(19) United States
(12) Patent Application Publication
(10) Pub. No.: US 2023/0287409 A1
(43) Pub. Date: Sep. 14, 2023

(54) COMPOSITIONS AND METHODS FOR TREATING NEURODEGENERATIVE DISEASES

(71) Applicant: MAZE THERAPEUTICS, INC., South San Francisco, CA (US)

(72) Inventors: Carleton Proctor GOOLD, South San Francisco, CA (US); Ronald CHEN, Pacifica, CA (US); Peter JANKI, South San Francisco, CA (US); Eric GREEN, South San Francisco, CA (US)

(21) Appl. No.: 17/796,563

(22) PCT Filed: Feb. 5, 2021
(86) PCT No.: PCT/US2021/016939

§ 371 Date: Jul. 29, 2022

Related U.S. Application Data
(60) Provisional application No. 62/971,873, filed on Feb. 7, 2020.

(51) Int. Cl. C12N 15/113; A61P 25/28

(52) U.S. Cl. CPC C12N 15/113; A61P 25/28; C12N 2310/14; C12N 2310/141

(57) ABSTRACT

The invention relates to inhibitory nucleic acids targeting the ataxin-2 gene (ATXN2), and expression cassettes and vectors comprising the same. Also provided herein are methods of treating neurodegenerative diseases, e.g., Amyotrophic Lateral Sclerosis and Spinocerebellar Ataxia-2.

### STATEMENT REGARDING SEQUENCE LISTING

[0001] The Sequence Listing associated with this application is provided in text format in lieu of a paper copy, and is hereby incorporated by reference into the specification. The name of the text file containing the Sequence Listing is 630264_401USPC_SEQUENCE_LISTING.txt. The text file is 666,463 bytes, was created on Jan. 6, 2023, and is being submitted electronically via EFS-Web.

### BACKGROUND

[0002] Ataxin-2 (ATXN2) protein is a cytoplasmic protein that is a component of stress granules. Stress granules are thought to be transient subcellular compartments induced by arrest of protein translation, and include a number of proteins known to be mutated in subjects with neurodegenerative disease (Brown and Al-Chalabi, N Engl J Med (2017) 377:162-172). Ataxin-2 contains a sequence of glutamine residues, known as a polyglutamine repeat, that in normal individuals is ˜22 amino acids in length. Expansions of this polyglutamine repeat to a length of 34 or longer is found in individuals with a neurodegenerative disease Spinocerebellar Ataxia-2 (SCA2). This disease is characterized by progressive death of Purkinje neurons in the cerebellum and other neuronal cell types. Patients with Spinocerebellar Ataxia-2 develop ataxia, sensory problems, and other clinical features, which worsen over time. Moderate expansion of Ataxin-2 polyglutamine repeat, which are longer than that observed in most individuals but that are shorter than those typically observed in subjects with Spinocerebellar Ataxia-2 (e.g., between 27 and 33 glutamine residues), have been reported at a substantially elevated frequency in individuals with the motor neuron disease amyotrophic lateral sclerosis (ALS) as compared to normal subjects (Elden et al., Nature (2010) 466:7310). This suggests that these polyglutamine repeats of intermediate length, i.e., between those found in normal individuals and those found in spinocerebellar ataxia-2 patients, increase risk for ALS. Currently, treatment options for SCA2 and ALS are limited.

### BRIEF SUMMARY

[0003] Aspects of the disclosure relate to compositions and methods for modulating expression of genes associated with spinocerebellar ataxia-2 (SCA2), amyotrophic lateral sclerosis (ALS), and conditions associated with TDP-43 proteinopathies. In particular, inhibitory nucleic acids are provided that are useful for inhibiting expression or activity of ataxin 2 (ATXN2). For example, inhibitory nucleic acids are provided that target one or more isoforms of ATXN2, e.g., a subset of ATXN2 isoforms, or all ATXN2 isoforms.

[0004] In one aspect, the disclosure provides an isolated nucleic acid molecule comprising an expression construct encoding an inhibitory nucleic acid that inhibits expression or activity of ATXN2, wherein the inhibitory nucleic acid comprises a guide strand sequence comprising the nucleic acid sequence set forth in any one of SEQ ID NOS: 4, 6, 8, 10, 12, 14, 16, 18, 20, 22, 24, 26, 28, 30, 32, 34, 36, 38, 40, 42, 44, 46, 48, 50, 52, 54, 56, 58, 60, 62, 64, 66, 68, 70, 72, 74, 76, 78, 80, 82, 84, 86, 88, 90, 92, 94, 96, 98, 100, 102, 104, 106, 108, 110, 112, 114, 116, 118, 120, 124, 126, 128, 130, 132, 134, 136, 138, 140, 142, 144, 146, 148, 150, 152, 154, 156, 158, 160, 162, 164, 166, 168, 170, 172, 174, 176, 178, 180, 182, 184, 186, 188, 190, 192, 194, 196, 198, 200, 202, 204, 206, 208, 210, 212, 214, 216, 218, 220, 222, 224, 226, 228, 230, 232, 234, 236, 238, 240, 242, 244, 246, 248, 250, 252, 254, 256, 258, 260, 262, 264, 266, 268, 270, 272, 274, 276, 278, 280, 282, 284, 286, 288, 290, 292, 294, 296, 298, 300, 302, 304, 306, 308, 310, 312, 314, 316, 318, 320, 324, 326, 328, 330, 332, 334, 336, 338, 340, 342, 344, 346, 348, 350, 352, 354, 356, 358, 360, 362, 364, 366, 368, 370, 372, 374, 376, 378, 380, 382, 384, 386, 388, 390, 392, 394, 396, 398, 400, 402, 404, 406, 408, 410, 412, 414, 416, 418, 420, 422, 424, 426, 428, 430, 432, 434, 436, 1176-1288, 1811-1827, 2015, 2065, 2083, 2152, 2203, and 2209.

[0005] In some embodiments, the inhibitory nucleic acid is a siRNA duplex, shRNA, miRNA, or dsRNA.

[0006] In some embodiments, the inhibitory nucleic acid further comprises a passenger strand sequence, optionally wherein the passenger strand sequence is selected from Tables 1, 19, 23, and 24, or a passenger strand sequence selected from Tables 1, 19, 23, and 24, and having 1-10 insertions, deletions, substitutions, mismatches, wobbles, or any combination thereof.

[0007] In some embodiments, the inhibitory nucleic acid is an artificial miRNA wherein the guide strand sequence is contained within a miRNA backbone sequence.

[0008] In some embodiments, the guide strand sequence and passenger strand sequence of the artificial miRNA are contained within a miRNA backbone sequence. In some embodiments, the miRNA backbone sequence is a miR-155 backbone sequence, a miR-155E backbone sequence, a miR-155M backbone sequence, miR1-1 backbone sequence, a miR-1-1_M backbone sequence, a miR-100 backbone sequence, a miR-100_M backbone sequence, a miR-190a backbone sequence, a miR-190a_M backbone sequence, a miR-124 backbone sequence, a miR-124_M backbone sequence, a miR-132 backbone sequence, a miR-9 backbone sequence, a miR-138-2 backbone sequence, a miR-122 backbone sequence, a miR-122_M backbone sequence, a miR-130a backbone sequence, a miR-16-2 backbone sequence, a miR-128 backbone sequence, a miR-144 backbone sequence, a miR-451a backbone sequence, or a miR-223 backbone sequence.

[0009] In some embodiments, the inhibitory nucleic acid is a miRNA comprising the nucleic acid sequence set forth in any one of SEQ ID NOS: 443-490, 1109-1111, 1114, 1121-1168, 1405-1520, 1908-2007, 2011, 2017, 2021, 2025, 2027, 2031, 2035, 2039, 2041, 2045, 2049, 2053, 2057, 2061, 2067, 2071, 2075, 2079, 2085, 2089, 2093, 2097, 2101, 2105, 2109, 2113, 2117, 2120, 2124, 2128, 2132, 2136, 2140, 2144, 2148, 2154, 2158, 2162, 2166, 2170, 2174, 2176, 2180, 2182, 2184, 2187, 2189, 2191, 2193, 2195, 2197, 2199, 2205, 2211, 2261, 2263, 2265, and 2267.

[0010] In some embodiments, the nucleic acid sequence encoding the inhibitory nucleic acid is located in an untranslated region of the expression construct. In some embodiments, the untranslated region is an intron, a 5′ untranslated region (5′UTR), or a 3′ untranslated region (3′UTR).

[0011] In some embodiments, the isolated nucleic acid comprising an expression construct encoding an inhibitory nucleic acid furthers comprises a promoter. In some embodiments, the promoter is a RNA pol III promoter (e.g., U6, H1, etc.), a chicken-beta actin (CBA) promoter, a CAG promoter, a H1 promoter, a CD68 promoter, a human synapsin promoter, or a JeT promoter. In some embodiments, the promoter is an H1 promoter comprising nucleotides 113-203 of SEQ ID NO:1522, nucleotides 1798-1888 of SEQ ID NO:1521, nucleotides 113-343 of SEQ ID NO:2257, or nucleotides 244-343 of SEQ ID NO:2257.

[0012] In some embodiments, the expression construct is flanked by a 5′ adeno-associated virus (AAV) inverted terminal repeat (ITR) sequence and a 3′ AAV ITR sequence, or variants thereof. In some embodiments, one of the ITR sequences lacks a functional terminal resolution site. In some embodiments, the ITRs are derived from an AAV serotype selected from the group consisting of: AAV1, AAV2, AAV5, AAV6, AAV6.2, AAV7, AAV8, AAV9, AAVRh10, AAV11, and variants thereof. In some embodiments, the 5′ ITR comprises nucleotides 1-106 of SEQ ID NO:2257 and the 3′ ITR comprises nucleotides 2192-2358 of SEQ ID NO:2257.

[0013] In another aspect, the disclosure provides a vector comprising the isolated nucleic acid as provided in the present disclosure. In some embodiments, the vector is a plasmid or viral vector. In some embodiments, the viral vector is a recombinant adeno-associated virus (rAAV) vector or a Baculovirus vector. In some embodiments, the vector is a self-complementary rAAV vector. In some embodiments, the vector (e.g., rAAV vector) further comprises a stuffer sequence. In some embodiments, the stuffer sequence comprises nucleotides 348-2228 of SEQ ID NO:1522 or nucleotides 489-2185 of SEQ ID NO:2257. In some embodiments, the vector (e.g., rAAV vector) comprises the nucleotide sequence of any one of SEQ ID NOS:2257-2260.

[0014] In another aspect, the disclosure provides a recombinant adeno-associated (rAAV) particle comprising the isolated nucleic acid molecule or rAAV vector as provided in the present disclosure. In some embodiments, the rAAV particle comprises a capsid protein. In some embodiments, the capsid protein is capable of crossing the blood-brain barrier. In some embodiments, the capsid protein is an AAV9 capsid protein or AAVrh.10 capsid protein. In some embodiments, the rAAV particle transduces neuronal cells and/or non-neuronal cells of the central nervous system (CNS).

[0015] In another aspect, the disclosure provides a pharmaceutical composition comprising the isolated nucleic acid as provided in the present disclosure, the vector as provided in the present disclosure, or the rAAV particle as provided in the present disclosure, and optionally a pharmaceutically acceptable carrier.

[0016] In another aspect, the disclosure provides a host cell comprising the isolated nucleic acid as provided in the present disclosure, the vector as provided in the present disclosure, or the rAAV particle as provided in the present disclosure.

[0017] In another aspect, the disclosure provides method for treating a subject having or suspected of having a neurodegenerative disease, the method comprising administering to the subject the isolated nucleic acid molecule as provided in the present disclosure, the vector as provided in the present disclosure, the rAAV particle as provided in the present disclosure, or the pharmaceutical composition as provided in the present disclosure. In some embodiments, the administration comprises direct injection to the CNS of the subject. In some embodiments, the direct injection is intracerebral injection, intraparenchymal injection, intrathecal injection, intrastriatal injection subpial injection, or any combination thereof. In some embodiments, the direct injection is direct injection to the cerebrospinal fluid (CSF) of the subject, optionally wherein the direct injection is intracistemal injection, intraventricular injection, and/or intralumbar injection. In some embodiments, the subject is characterized as having an ATXN2 allele having at least 22 CAG trinucleotide repeats, optionally wherein the ATXN2 allele has at least 24 CAG trinucleotide repeats, at least 27 CAG trinucleotide repeats, at least 30 CAG trinucleotide repeats, or at least 33 or more CAG trinucleotide repeats. In some embodiments, the neurodegenerative disease is spinocerebellar ataxia-2, amyotrophic lateral sclerosis, frontotemporal dementia, primary lateral sclerosis, progressive muscular atrophy, limbic-predominant age-related TDP-43 encephalopathy, chronic traumatic encephalopathy, dementia with Lewy bodies, corticobasal degeneration, progressive supranuclear palsy (PSP), dementia Parkinsonism ALS complex of guam (G-PDC), Pick's disease, hippocampal sclerosis, Huntington's disease, Parkinson's disease, or Alzheimer's disease.

[0018] In another aspect, the disclosure provides a method of inhibiting ATXN2 expression in a cell, the method comprising delivering to the cell the isolated nucleic acid molecule as provided in the present disclosure, the vector as provided in the present disclosure, the rAAV particle as provided in the present disclosure, or the pharmaceutical composition as provided in the present disclosure. In some embodiments, the cell has an ATXN2 allele having at least 22 CAG trinucleotide repeats, optionally wherein the ATXN2 allele has at least 24 CAG trinucleotide repeats, at least 27 CAG trinucleotide repeats, at least 30 CAG trinucleotide repeats, or at least 33 or more CAG trinucleotide repeats. In some embodiments, the cell is a cell in the CNS, optionally a neuron, glial cell, astrocyte, or microglial cell. In some embodiments, the cell is in vitro. In some embodiments, the cell is from a subject having one or more symptoms of a neurodegenerative disease. In some embodiments, the cell is from a subject having or suspected of having a neurodegenerative disease. In some embodiments, the neurodegenerative disease is spinocerebellar ataxia-2, amyotrophic lateral sclerosis, frontotemporal dementia, primary lateral sclerosis, progressive muscular atrophy, limbic-predominant age-related TDP-43 encephalopathy, chronic traumatic encephalopathy, dementia with Lewy bodies, corticobasal degeneration, progressive supranuclear palsy (PSP), dementia Parkinsonism ALS complex of guam (G-PDC), Pick's disease, hippocampal sclerosis, Huntington's disease, Parkinson's disease, or Alzheimer's disease.

[0019] In another aspect the present disclosure provides a method of inhibiting ATXN2 expression in the central nervous system of a subject, the method comprising administering to the subject the isolated nucleic acid molecule as provided in the present disclosure, the vector as provided in the present disclosure, the rAAV particle as provided in the present disclosure, or the pharmaceutical composition as provided in the present disclosure. In some embodiments, the administration comprises direct injection to the CNS of the subject. In some embodiments, the direct injection is intracerebral injection, intraparenchymal injection, intrathecal injection, intrastriatal injection, subpial injection, or any combination thereof. In some embodiments, the direct injection is injection to the cerebrospinal fluid (CSF) of the subject, optionally wherein the direct injection is intracistemal injection, intraventricular injection, and/or intralumbar injection. In some embodiments, the subject has an ATXN2 allele having at least 24 CAG trinucleotide repeats, at least 27 CAG trinucleotide repeats, at least 30 CAG trinucleotide repeats, or at least 33 or more CAG trinucleotide repeats.

[0020] In another aspect, the present disclosure provides an artificial miRNA comprising a guide strand sequence and a passenger strand sequence, wherein the guide strand sequence comprises any one of SEQ ID NOS: 4, 6, 8, 10, 12, 14, 16, 18, 20, 22, 24, 26, 28, 30, 32, 34, 36, 38, 40, 42, 44, 46, 48, 50, 52, 54, 56, 58, 60, 62, 64, 66, 68, 70, 72, 74, 76, 78, 80, 82, 84, 86, 88, 90, 92, 94, 96, 98, 100, 102, 104, 106, 108, 110, 112, 114, 116, 118, 120, 124, 126, 128, 130, 132, 134, 136, 138, 140, 142, 144, 146, 148, 150, 152, 154, 156, 158, 160, 162, 164, 166, 168, 170, 172, 174, 176, 178, 180, 182, 184, 186, 188, 190, 192, 194, 196, 198, 200, 202, 204, 206, 208, 210, 212, 214, 216, 218, 220, 222, 224, 226, 228, 230, 232, 234, 236, 238, 240, 242, 244, 246, 248, 250, 252, 254, 256, 258, 260, 262, 264, 266, 268, 270, 272, 274, 276, 278, 280, 282, 284, 286, 288, 290, 292, 294, 296, 298, 300, 302, 304, 306, 308, 310, 312, 314, 316, 318, 320, 324, 326, 328, 330, 332, 334, 336, 338, 340, 342, 344, 346, 348, 350, 352, 354, 356, 358, 360, 362, 364, 366, 368, 370, 372, 374, 376, 378, 380, 382, 384, 386, 388, 390, 392, 394, 396, 398, 400, 402, 404, 406, 408, 410, 412, 414, 416, 418, 420, 422, 424, 426, 428, 430, 432, 434, 436, 1176-1288, 1811-1827, 2015, 2065, 2083, 2152, 2203, and 2209.

[0021] In some embodiments, the guide strand sequence and passenger strand sequence are contained within a miR backbone sequence. In some embodiments, the miR backbone sequence is a miR-155 backbone sequence, a miR-155E backbone sequence, a miR-155M backbone sequence, miR1-1 backbone sequence, a miR-1-1_M backbone sequence, a miR-16-2 backbone sequence, a miR-100 backbone sequence, a miR-100_M backbone sequence, a miR-190a backbone sequence, a miR-190a_M backbone sequence, a miR-124 backbone sequence, a miR-124_M backbone sequence, a miR-132 backbone sequence, a miR-9 backbone sequence, a miR-138-2 backbone sequence, a miR-122 backbone sequence, a miR-122_M backbone sequence, a miR-130a backbone sequence, a miR-128 backbone sequence, a miR-144 backbone sequence, a miR-451a backbone sequence, or a miR-223 backbone sequence.

[0022] In some embodiments, the artificial miRNA comprises a sequence as set forth in any one of SEQ ID NOS: 443-490, 1109-1111, 1114, 1121-1168, 1405-1520, 1908-2007, 2011, 2017, 2021, 2025, 2027, 2031, 2035, 2039, 2041, 2045, 2049, 2053, 2057, 2061, 2067, 2071, 2075, 2079, 2085, 2089, 2093, 2097, 2101, 2105, 2109, 2113, 2117, 2120, 2124, 2128, 2132, 2136, 2140, 2144, 2148, 2154, 2158, 2162, 2166, 2170, 2174, 2176, 2180, 2182, 2184, 2187, 2189, 2191, 2193, 2195, 2197, 2199, 2205, 2211, 2261, 2263, 2265, and 2267.

[0023] In another aspect, the present disclosure provides an isolated RNA duplex comprising a guide strand sequence and a passenger strand sequence, wherein the guide strand sequence comprises the nucleic acid sequence set forth in any one of SEQ ID NOS: 4, 6, 8, 10, 12, 14, 16, 18, 20, 22, 24, 26, 28, 30, 32, 34, 36, 38, 40, 42, 44, 46, 48, 50, 52, 54, 56, 58, 60, 62, 64, 66, 68, 70, 72, 74, 76, 78, 80, 82, 84, 86, 88, 90, 92, 94, 96, 98, 100, 102, 104, 106, 108, 110, 112, 114, 116, 118, 120, 124, 126, 128, 130, 132, 134, 136, 138, 140, 142, 144, 146, 148, 150, 152, 154, 156, 158, 160, 162, 164, 166, 168, 170, 172, 174, 176, 178, 180, 182, 184, 186, 188, 190, 192, 194, 196, 198, 200, 202, 204, 206, 208, 210, 212, 214, 216, 218, 220, 222, 224, 226, 228, 230, 232, 234, 236, 238, 240, 242, 244, 246, 248, 250, 252, 254, 256, 258, 260, 262, 264, 266, 268, 270, 272, 274, 276, 278, 280, 282, 284, 286, 288, 290, 292, 294, 296, 298, 300, 302, 304, 306, 308, 310, 312, 314, 316, 318, 320, 324, 326, 328, 330, 332, 334, 336, 338, 340, 342, 344, 346, 348, 350, 352, 354, 356, 358, 360, 362, 364, 366, 368, 370, 372, 374, 376, 378, 380, 382, 384, 386, 388, 390, 392, 394, 396, 398, 400, 402, 404, 406, 408, 410, 412, 414, 416, 418, 420, 422, 424, 426, 428, 430, 432, 434, 436, and 1176-1288, 1811-1827, 2015, 2065, 2083, 2152, 2203, and 2209, optionally wherein the guide strand sequence and passenger strand sequence are linked by a loop region to form a hairpin structure comprising a duplex structure and a loop region. In some embodiments, the loop structure comprises from 6 to 25 nucleotides.

[0024] In another aspect, the disclosure provides a kit comprising a container housing a composition as described by the present disclosure.

### BRIEF DESCRIPTION OF THE SEVERAL VIEWS OF THE DRAWINGS

[0025] FIG. 1 shows tuning mean squared error for mir-30 dataset (Pelossof et al., Nature Biotechnology (2017) 35:350-353). Data showing the mean squared error (MSE) for prediction performance of the shRNA prediction algorithm on a set of shRNAs targeting Kras, held out from a data set of shRNAs used to train the support vector machine model to predict shRNA performance. Mean squared error is calculated as the square of the difference between the score of the support vector machine (SVM) predictor and the label 1 or −1, corresponding to shRNAs empirically determined to yield good knockdown or poor knockdown. These squared differences are averaged across shRNAs tested. The hyperparameter c was varied and the mean squared errors calculated for each value c.

[0026] FIG. 2 shows a plot of precision vs recall for SVM model applied to held-out shRNAs targeting Trp53 gene, after training on the shRNAs targeting the other genes in the TILE dataset (Pelossof et al, Nature Biotechnology (2017) 35:350-353). Horizontal line at approximately 0.19 represents the fraction of shRNAs that are positive, i.e., yielding good knockdown, out of the total number of shRNAs, in the set of all shRNAs targeting Trp53. The precision-recall line represents, varying across values of the SVM score, the fraction of true positives that are included in the dataset (‘recall’), versus the fraction of true positives relative to false positives (‘precision’), at a given SVM score cutoff. Thus, at the least stringent SVM score, all true positives are included (recall=1), but precision is low because many negative shRNAs are included.

[0027] FIG. 3 shows two curves are plotted against SVM score. In one, the cumulative fraction of positive shRNAs that are expected to be lost as the classifier score is increased is shown. This is denoted by the bold line. In the other, the percent improvement in rejection of low-performing shRNAs is shown. This is denoted by the lighter line. Vertical dashed lines, from left to right, represent the 25^{th} percentile (light dashed) and 50^{th} percentile (bold dashed) of SVM scores in the dataset, the shRNAs targeting Trp53.

[0028] FIG. 4 shows jitter plots of the distribution of SVM score predictions as a function of the first base of the guide sequence of the shRNA sequences targeting ATXN2. All data points are shown; the horizontal width of the ‘violin’ is proportional to the number of points at each SVM score, which is plotted on the y axis. On the left, the score is calculated for guide sequences that are perfectly complementary to the ATXN2 sequence (guide sequence base at position 1 is A, U, C, or G). On the right, the score is calculated if the first base is converted to U (edit guide sequence base at position 1 to U if guide at position 1 does not natively begin with U). Note that guide sequences which originally begin with U will have the same score in the right plot, whereas sequences which begin with A, G, or C will have different scores. In general, the SVM score increases if the first base is U.

[0029] FIG. 5 shows a plot of ATXN2 quantigene assay values across a panel of commonly used cell lines. Signal is reported with 30 μL (left bar) or 10 μL (right bar) of lysate. “−” represents negative control with no cellular material. Y-axis is the assay signal. Additional horizontal line represents the minimal signal selection criterion.

[0030] FIGS. 6A-6B show a ‘Sashimi’ plot of the alternative splicing of Ataxin-2 transcript from human brain or from HepG2.5 cells. FIG. 6A: For brain, representative plots from two different individuals are shown. The height of the bars in the plot represents the number of reads aligning to the position in Ataxin-2, according to the diagram underneath the plot. Numbers on curved arcs represent the count of reads aligning across exon-exon junctions. Injunctions where the arcs are on both top and bottom, this indicates potential alternative splicing of the transcript. Arrows point out exons subject to substantial alternative splicing, such that these exons do not appear in a substantial number of ATXN2 transcripts in human brain. The diagram at the bottom of the plot represents the structure of the transcript ENST00000377617.7, with exons as solid rectangles. The transcript is oriented from right to left, with exon 1 on the right. FIG. 6B: Similar data from HepG2 cells is shown. The alignment to the transcript is not to scale.

[0031] FIG. 7 shows ATXN2 mRNA values across tested siRNAs, at 20 nM, 1 nM, and 200 pM doses. The x-axis shows the position of the ATXN2 sequence (SEQ ID NO: 2) that the corresponding siRNA is complementary to. ATXN2 mRNA values represents the ratio of ATXN2 to GAPDH signal from quantigene assay, normalized to mock control. 3′ UTR on the X-axis shows the general position of the 3′ untranslated region of the ATXN2 transcript.

[0032] FIG. 8. Correlation plot of the ATXN2 mRNA knockdown (ratio of ATXN2 to GAPDH signal, normalized to mock transfected controls), versus the SVM score. The expected correlation is observed, indicating that high SVM scores predict good knockdown performance.

[0033] FIG. 9. Plot of ATXN2 signal from ATXN2 siRNA treated U2OS cells, derived from indirect immunofluorescence, for the indicated conditions. XD-ID Nos represent treatment with different siRNAs corresponding to Table 1, at the indicated dose (20 nM (top) or 1 nM (bottom)). Other treatments are indicated as follows: “no_primary_secondary”=during antibody staining, the Ataxin-2 primary antibody was omitted, secondary antibody was included; “no_primary_no secondary”=during antibody staining, both the Ataxin-2 primary antibody and the secondary fluorescent antibody against the Ataxin-2 antibody were omitted; “primary_no secondary”=during antibody staining, the Ataxin-2 primary antibody was included but the secondary fluorescent antibody against the Ataxin-2 antibody was omitted; “SMP”=a pool of 4 siRNAs targeting ATXN2, with chemically modified nucleotides, obtained from Dharmacon; “primary_secondary”=untreated cells stained with primary and secondary antibody; “NTC”=cells treated with a ‘non-targeting control’ siRNA, not expected to target any human transcripts, with chemically modified nucleotides, obtained from Dharmacon; “XD-LucControl”=an siRNA, comprised only of RNA bases as in the ATXN2 targeting siRNAs, expected to target the luciferase gene but not to target ATXN2. In the plot, each point represents signal averaged across all cells in a well. Outliers, which were excluded from calculation of mean knockdown across wells in Tables 6 and 7, are shown as lighter colored points.

[0034] FIGS. 10A-10B show representative images of ATXN2 siRNA treated U2OS cells as described in FIG. 9. FIG. 10A: Representative images of siRNA (20 nM) treated U2OS cells. Top panels, Hoechst staining demarcates cell nuclei. Bottom panels, ATXN2 indirect immunofluorescence. Treatment/staining procedure is shown below image panels. FIG. 10B: As in FIG. 11A, but for U2OS samples treated with siRNAs at 1 nM.

[0035] FIG. 11 shows a plot of normalized ATXN2 indirect immunofluorescence signal, as a function of position along ATXN2 transcript (SEQ ID NO: 2). The x-axis is restricted to the positions along the ATXN2 transcript spanning the binding sites of the tested siRNAs.

[0036] FIGS. 12A-12C show dose response of various siRNAs tested. FIG. 12A (top) shows a plot of log IC50 across siRNA IDs tested in Group 1. Bars represent span of 95% confidence interval for IC50 values. FIG. 12A (bottom) shows representative dose response curves for siRNAs. Y-axis represents ratio of ATXN2 to GAPDH signal from quantigene assay of mRNA levels, from lysates of HepG2 cells dosed with indicated concentration of siRNA. Fits represents 3-parameter logistic regression fits, with Hill slope set constant at 1. Outliers were automatically identified, excluded from curve fitting and IC50 estimation. FIG. 12B shows a plot of log IC50 across siRNA IDs tested in Group 2. Bars represent span of 95% confidence interval for IC50 values. FIG. 12C shows a representative dose response curves for siRNAs. Y-axis represents ratio of ATXN2 to GAPDH signal from quantigene assay of mRNA levels, from lysates of HepG2 cells dosed with indicated concentration of siRNA. Fits represents 3-parameter logistic regression fits, with Hill slope set constant at 1. Outliers were automatically identified, excluded from curve fitting and IC50 estimation, and are indicated on graph.

[0037] FIG. 13 shows predicted folding patterns of guide sequences embedded in miRNA backbones, as created using the web-based server mfold. Multiple fold predictions are obtained; a representative fold is shown. Note the unpaired, ‘bulged’ nucleotides at several positions in each miRNA in the vicinity of the guide sequence, except in the ‘sealed’ variant.

[0038] FIG. 14 shows fluorescence automated cell sorting data demonstrating reduction in signal intensity for a GFP (stop)-ATXN2 reporter construct-expressing U2OS cell line by artificial miRNAs. Cells were transfected with vectors containing inserts either including the guide sequence of XD-14792 (SEQ ID NO:112), or control guide sequences, embedded in miRNA backbones. Y-axis plots the median fluorescence intensity of cells within each replicate. Replicates derive from wells of a 96-well plate containing cells that were transfected with vectors. The cells were dissociated with trypsin prior to FACS analysis.

[0039] FIG. 15 shows thresholding procedure to distinguish transduced from untransduced cells in imaging experiments using lentivirally packaged ATXN2-specific artificial miRNAs. Lentiviral vectors (similar to pLVX-EF1A_mCherry-miR-1-1-XD_14890-WPRE_CMV (SEQ ID NO:546)) express mCherry and so identification of mCherry expression distinguishes transduced from untransduced cells. Left panel shows histogram of signal in the fluorescence channel used to detect mCherry signal (including indirect immunofluorescence from an anti-mCherry antibody and fluorescent secondary antibody). Right panel shows histogram of signal from cells transduced with mCherry-encoding vector, with a clear bimodal distribution of signals representing untransduced cells (low signal) and transduced cells (high signal). Vertical line shows threshold used to separate mCherry positive from mCherry negative cells, placed such that no untransduced cells exceed this signal threshold and such that the large majority of the right peak of the bimodal histogram of mCherry signal in transduced cells exceeds this threshold.

[0040] FIG. 16 shows ATXN2 signal normalization procedure for artificial miRNA high content imaging assay. Each point represents signal in the channel used to detect indirect immunofluorescence for ATXN2, average across cells in the well. ATXN2 knockout cells were used to determine the background levels of indirect immunofluorescence for the ATXN2 antibody. The different cell types and staining conditions are shown, with the y-axis normalized with 100% set to the signal from wild-type, untransduced cells and 0% set to the signal from untransduced ATXN2 knockout cells. The signal in the ATXN2-antibody stained ATXN2 knockout cells somewhat exceeds signal from cells not stained with antibody, indicating that there is some background associated with the antibody and that using the ATXN2 knockout can help correct for this background to improve accuracy in measuring ATXN2 protein signal.

[0041] FIGS. 17A-17B show plots of ATXN2 signal from wells transduced with lentiviral vectors expressing guide sequences (shown on x-axis) embedded in miRNA backbones (miR-155E—FIG. 17A; miR1-1—FIG. 17B). Guide sequences and miRNA context sequences are listed in Table 11.

[0042] FIG. 18A-18B show representative images of Hoechst 33342 stain (top row), mCherry signal (middle row), and ATXN2 indirect immunofluorescence signal (bottom row) from cells as quantified in FIG. 17. FIG. 18A shows data for guide sequences embedded in miR-155E backbone; FIG. 18B shows data for guide sequences embedded in miR1-1 backbone.

[0043] FIG. 19 shows a plot of ATXN2 protein signal from miRNA-embedded anti-ATXN2 guide sequences versus ATXN2 mRNA signal from anti-ATXN2 siRNA treatment. There is correlation between the mRNA and protein knockdown across conditions tested.

[0044] FIGS. 20A-20C show validation of CRISPR guide RNAs in disrupting Ataxin-2 gene and knocking out Ataxin-2 protein in U2OS cells. FIG. 20A shows western blot analysis of U2OS cells nucleofected with ATXN2-targeting CRISPR gRNAs, complexed with Cas9 protein. Treatments include no nucleofection controls, control guide RNAs targeting CD81 or expected to be non-targeting, and five unique ATXN2 targeting guides. Immunoblots against Ataxin-2 protein and alpha-tubulin loading control are shown. FIG. 20B shows representative histograms and FIG. 20C shows median fluorescence intensity within treated wells of Ataxin-2 indirect immunofluorescence signal for cells nucleofected with indicated treatments, as in FIG. 20A.

[0045] FIGS. 21A-21B show U2OS ATXN2 knockout clones generated for assay calibration. FIG. 21A shows ATXN2 U2OS knockout cell line generation scheme. FIG. 21B shows western blot analysis from clonal lines generated after nucleofection with indicated ATXN2 targeting gRNA. The lane containing protein from lysed material from the clone (clone 43) selected for use is indicated by the arrow.

[0046] FIG. 22 show knockdown of Ataxin-2 protein in vivo after AAV vectorized amiRNA delivery. AAV encoding miRNAs XD-14792 or XD-14887, embedded in the miR-1-1 backbone, or a control construct lacking a miRNA, was delivered intravenously to adult wild-type mice by tail vein injection. 15 days after injection, animals were euthanized and livers were harvested and snap-frozen. GFP fluorescence, resulting from vector encoded GFP, was detected in the liver upon blue light illumination. FIG. 22 (left): Liver lysate was immunoblotted for Ataxin-2, beta-actin, and GFP (not shown). Each lane is derived from a different animal. FIG. 22 (right): Ataxin-2 signal was normalized to beta-actin signal. All miRNA-dosed animals had lower Ataxin-2 signal than animals dosed with control AAV vector. Each point represents ratio of Atxn2 to Beta actin signal from an individual animal.

[0047] FIGS. 23A-23B show quality metrics of pooled library screen of Atxn2-targeting miRNAs (“Deep Screen 1”). FIG. 23A shows a scatter plot comparing ratios of high- and low-sorted samples in two replicates, showing tight correlation. FIG. 23B shows correlation matrix between all samples tested. Spearman correlation was calculated between guide sequence count vectors between all samples.

[0048] FIG. 24 shows ratio baseline subtraction procedure. Raw count ratios (log-base 2 transformed) are shown on x-axis, for top, ATXN2-targeting miRNAs, and bottom, scrambled miRNAs. For subsequent calculations, the median of the ratio for the scrambled miRNAs was subtracted.

[0049] FIG. 25 shows a plot of ATXN2 signal depletion versus cell depletion. Each point represents a library element, containing a miRNA targeting either the ATXN2 transcript; a scrambled sequence; or a sequence targeting an essential gene and expected to reduce cell proliferation and/or viability. The x-axis is the average across replicates of the ratio of sequence counts derived from cells in the high- and low-ATXN2 FACS gate populations. The y-axis is the average across replicates of the ratio of sequence counts derived from HeLa cells after initial transduction and after 16 days. Points falling toward the bottom of the axis represents elements that were depleted from the 16 day timepoint relative to the initial transduction timepoint.

[0050] FIG. 26 shows a plot of ATXN2 signal depletion versus position on ATXN2 transcript of complementarity of guide sequence. Points toward the bottom represent guide sequences with greater knockdown of ATXN2; points toward the top of the y-axis represent guide sequences with less knockdown of ATXN2.

[0051] FIG. 27 shows a similar plot as in FIG. 26, but zoomed-in on the 3′ end of the ATXN2 transcript. In black are sequences deemed part of ‘hotspots’ in the 3′ UTR of the ATXN2 transcript.

[0052] FIG. 28 shows the percent of reads, averaged across scrambled guide sequences, that match to a guide sequence excised from the pri-miRNA at the indicated position. The diagram above shows an example sequence, where the bold text to the left is miR backbone sequence and the regular text is the guide sequence. Arrows and numbers indicated cleavage position (for the tiled screened described here, in the miR 16-2 backbone, Drosha is the expected enzyme for this cleavage event). The seed sequence for a guide sequence cut at the expected position is shown. The position of this seed sequence will shift if the guide position is cut out of the pri-miRNA at a different position from the expected position.

[0053] FIG. 29 shows representative images used in assessing the production of motor neurons in the stem cell differentiation protocols. Upper left image shows overlay of indirect immunofluorescence signal from anti-HB9 and anti-Beta 3 tubulin (TUJ1) antibodies. Upper right shows overlay of signal from anti-ISLET1 and TUJ1 signal. Lower left shows overlay of HB9, ISLET1, and TUJ1 signal. Bottom right shows overlay of HB9, ISLET1, TUJ1, and nuclear DAPI stain. In the images, neuronal processes are clearly seen as labeled by TUJ1 antibody. Neuronal nuclei are labeled by the motor neuron markers HB9 and Islet1, with 25-35% of neurons labeled with HB9, 50-60% labeled by Islet1, and 70-80% of cells positive for TUJ1 signal.

[0054] FIG. 30A-30C show data from an experiment testing knockdown of ATXN2 mRNA and protein after transduction of ATXN2-targeting amiRNAs in lentiviral format in stem-cell derived motor neurons. FIG. 30A is a schematic of the cassette packaged in lentiviral vectors, with an H1 promoter driving the artificial miRNA, followed by a Pol III termination signal (6T). After this miR expression cassette, a CMV Pol II promoter drives expression of the fluorescent reporter GFP, and is followed by a WPRE element to stabilize the GFP transcript. FIG. 30B shows data from qPCR against ATXN2 mRNA. Each dot represents a biological replicate derived from a distinct tissue culture well of motor neurons. Data represent average signal calculated from change in qPCR threshold (CT) for ATXN2 versus either GUSB or B2M. Bars are mean of replicates, and error bars are standard deviation across replicates. ATXN2 signal is normalized to levels measured from motor neurons growing in wells not treated with vector. Data from wells treated with a control lentiviral vector with the multiple cloning site (MCS) in place of the amiRNA is shown as “MCS.” Two amiRNAs were tested, with amiRNAs targeting indicated position in ATXN2 transcript (1784 or 4402) indicated; amiRs were embedded in the miR16-2 backbone. The guide sequence targeting ATXN2 position 1784 is also referred to as XD-14792. Lentiviral vectors were dosed at two concentrations. The viral dose to achieve a multiplicity of infection (MOI) of 2.5 or 4.5 was calculated based on titration in U2OS cells (FACS analysis of GFP signal, calculating % cells positive for GFP). Using these values and the number of neurons plated per well, the corresponding dose of vector to achieve MOI of 2.5 or 4.5 in the motor neuron cultures (calculated based on the U2OS infectivity) was used. Observation of GFP fluorescence in cultures confirmed that transduction was near complete, as expected if the U2OS MOI was similar to the motor neuron MOI. FIG. 30C shows assessment of ATXN2 protein assessment from cultures treated the same as in FIG. 30B. The top panel shows the Western blot, with clear evidence of reduction in signal in lanes with protein from wells treated with amiRNAs targeting ATXN2 versus untreated wells or wells treated with the control MCS vector. Bottom panel quantifies ATXN2 immunoblot signal, with each point representing a biological replicate, the bars representing mean across replicates and the error bars standard deviation.

[0055] FIG. 31. Data is presented from an experiment performed similarly to that shown in FIG. 30. In this experiment, the MOI (as calculated by infectivity in U2OS cells) was 3.5. Knockdown in motor neurons treated with lentiviral vectors with miR 16-2 backbone-embedded amiRNAs targeting indicated ATXN2 transcript position is shown. Horizontal dashed line represents the threshold of 80% knockdown. In this experiment, it is apparent that the amiRNAs targeting the ATXN2 transcript in the 3′ UTR do not yield the same level of knockdown as amiRNAs targeting the ATXN2 coding sequence. Bars show mean knockdown, normalized to wells not treated with lentiviral vector; each point is a biological replicate (neurons from an individual well), and error bars are standard deviations across replicates. As above, MCS represents a lentiviral vector with a control multiple cloning site in place of a miR cassette.

[0056] FIG. 32. 2% agarose TAE gel demonstrating truncations in miR16-2 backbone-embedded amiRNAs packaged in AAV9. AAV genomic DNA was column purified and concentration quantified by Qubit fluorometer. Equal amounts of vector genome DNA, by Qubit measurement, were loaded into gel and subject to electrophoresis. Note that the gel image shown was spliced together for clarity. Leftmost lane is a DNA size ladder, with indicated DNA sizes in kilobases shown. From left to right, samples are (all DNA derived from purified AAV vector genomes): (1) H1 promoter driving miR1-1 XD-14792 (1784), followed by CBh promoter driving GFP; (2) H1 promoter followed by a non-miR multiple cloning site, followed by stuffer sequence “AMELY_V1”; (3-11) From left to right, AAV with amiRNAs targeting ATXN2 at positions 1784, 1479, 1755, 3330, 4402, 4405, 4406, 4409, and 4502. Each lane has an amiRNA targeting ATXN2, in the same vector genome format as lane 2 replacing the MCS with the indicated miR cassette, with miR16-2 backbone. Note in all of the material from AAV genomes with miR16-2 backbone miR cassettes the presence of both an upper band, running at the intended size, as well as a faster migrating lower band.

[0057] FIG. 33A-33B. Data from Deep Screen 2 showing replicate to replicate consistency (FIG. 33A) and performance across miR backbones (FIG. 33B). In FIG. 33A, each point represents the relative abundance of a library element, with position on the x-axis representing the log 2 fold change in abundance between the 10^{th} percentile ATXN2 sort and unsorted cells from the first screen replicate, and the y-axis the corresponding log 2 fold change from the second screen replicate. Points on the far right of the graph represent data where the denominator in the ratio of sequence counts for sorted and unsorted cells is 0, and hence undefined when log-transformed. There is good correspondence between the replicates for elements exhibiting substantial knockdown (log 2 fold change <−1), but for inactive controls (including essential gene targeting amiRNAs, 911 controls, and scramble controls), there is more variability from replicate to replicate in this screen compared to Deep Screen 1. As a result there is some deviation from screen replicate to replicate in the negative control medians. No baseline subtraction was done because of the agreement in log 2 fold change values for active amiRNAs. In FIG. 33B, boxplots represent the ATXN2 knockdown performance across amiRNAs embedded in various miR backbones. In each boxplot, the center line is the median, the upper and lower edges of the box represent the 75^{th} and 25^{th} percentiles, and the line extends beyond the box edges to either the maxima/minima or 1.5 times the interquartile range (difference between 25^{th} and 75^{th} percentiles), whichever is closer to the median. Overlaying points (very faint, transparent) represent the ATXN2 knockdown signal from individual miRNAs. The y-axis represents the mean log 2 fold-change between the abundance of sequencing reads of elements detected in the 10^{th} percentile of ATXN2 signal relative to the abundance of the guide in unsorted cells. In this screen, the theoretical maximum fold-change is 10-fold between the 10^{th} percentile sort and un-sorted cells.

[0058] FIG. 34. Depletion of essential-gene targeting amiRNAs in various miR backbones at a late timepoint T₁ (18 days after transduction) versus an early timepoint T₀ (1 day after transduction). The y-axis represents the log₂ fold change in abundance between the two timepoints, and was not baseline subtracted. A similar ranking between the ‘performance’ of each miR backbone in inducing guide depletion over time, when expressing essential gene-targeting amiRNAs as in this figure, versus performance of miR backbones in ATXN2 knockdown when expressing ATXN2-targeting amiRNAs, as in FIG. 33, can be seen.

[0059] FIG. 35. Agarose gel with purified AAV vector genomes with various miR backbones, with amiRNA targeting Atxn2 at position 4402 (first 10) embedded, or targeting position 1784 (last 2; 1784 guide sequence is same as XD-14792). Note that image is spliced for clarity (to place lane including DNA size ladder immediately adjacent to relevant lanes). Some lanes have bands that both migrate differently than others (miR122, miR1-1-4402, miR-1-1XD14792), this is likely due to differences in loading or dye binding and not true migration differences. More importantly, across miR backbones there are differences in the relative intensity of the second most intense band, migrating farther than the most intense upper band which is the presumed intended vector genome. AAV vector genomes with miR100 and miR128 backbones in particular have a less intense faster migrating band than others.

[0060] FIG. 36. Agarose gel with AAV vector genomes derived from pools of cis plasmids. Each pool includes elements generated by PCR amplification from an oligonucleotide pool containing a mixture of amiRs embedded in multiple miR backbones, and the PCR primers used do not distinguish between parent and “_M” form miR backbones. Thus, the pool labeled miR-1-1 will include amiRs in backbones miR-1-1 and miR-1-1_M; the pool labeled miR-100 will contain miR-100 and miR-100_M backbones; the pool labeled miR-190a will contain miR-190a and miR-190a_M backbones; the pool miR-124 will contain miR-124 and miR-124_M backbones; the pool miR-138-2 will contain miR-138-2 and miR-138-2_M backbones. miR-155M and miR-155E, though not related to each other by the “_M” modification rules, also have high sequence similarity and therefore the pool labeled “miR-155M” likely contains a mix of miR-155M and miR-155E backbones. Each lane contains purified vector genome DNA from AAV generated with indicated plasmid pool. The last lane is derived from a mixture of the 5 micropools shown in the gel as well as micropools with miR backbones miR-124, miR-128, miR-138-2, miR-144, and miR-155M. As in FIG. 35, the AAV pool with the miR-100 backbone (dashed box) has a less intense faster migrating band than the other AAV pools.

[0061] FIG. 37. Data from Deep Screen 2, only including elements with miR-100 or miR-100_M backbones. As in FIG. 33A, each point represents the relative abundance of a library element, with position on the x-axis representing the log 2 fold change in abundance between the 10^{th} percentile ATXN2 sort and unsorted cells from the first screen replicate, and the y-axis the corresponding log 2 fold change from the second screen replicate.

[0062] FIG. 38. RT-ddPCR data demonstrating knockdown of ATXN2 mRNA in stem-cell derived motor neurons 7 days after treatment with scAAV-DJ vectors expressing ATXN2-targeting amiRNAs. Each point represents a biological replicate (a well of neurons treated with AAV at indicated dose of vector genomes per cell). Indicated amiRNAs, denoted as miR backbone—Atxn2 targeting position, mark x-axis. The amiRNAs were embedded in a self-complementary vector genome, with an H1 promoter driving the amiR, and a stuffer sequence modified from PSG11, “PSG11_V5” (nucleotides 489-2185 of SEQ ID NO:2257) 3′ of the miR cassette up to the wild-type ITR. The y-x is represents RT-ddPCR signal, with copies of each transcript per unit microliter derived from percentage of positive to negative droplets for primer/probesets specific to ATXN2, GUSB, or B2M. The points represent averages of ratios of ATXN2/GUSB and ATXN2/B2M ratios.

[0063] FIG. 39. This graph shows a RT-ddPCR experiment similar to that in FIG. 38, except spanning a broader range of indicated doses. Because of constraints on the number of available cells, not all amiRNAs were treated with all doses. In this experiment, the ATXN2 mRNA level is calculated by ATXN2/B2M RT-ddPCR ratios.

[0064] FIG. 40. Images of stem-cell derived motor neurons treated with scAAV-DJ vector as in FIGS. 38 and 39. Cells were treated with a dose of 1E4 vector genomes per cell. Representative images of DAPI stain (to label cell nuclei), indirect immunofluorescence signal for anti-ISL1 antibody (to label motor neurons), and TUJ1 signal, to label neuronal processes. No obvious differences were seen in neuronal processes between neurons treated with an active ATXN2-targeting amiRNA (1755) and an inactive (1755_911) amiRNA in scAAV-DJ. Panels at right (top) quantify total number of cells, defined by DAPI staining, and (bottom) quantify fraction of cells that are positive for ISL1. Each point represents average quantification across fields for a given well. Asterisks indicate significant (p<0.05) difference versus vehicle (PBS+0.001% PF-68) control, calculated by one-way ANOVA followed by Dunnett's multiple comparisons test. Vectors encode amiRNAs targeting indicated ATXN2 transcript position in miR100 or miR100_M backbone (FIGS. 38 and 39 show which amiRNA is in miR100 and which is in miR100_M backbones). “PBS” represents wells of motor neurons treated with vehicle (PBS+0.001% PF-68); GFP represents the amiRNA and GFP expressing vector H1-miR1-1.XD-14792-CBh-GFP packaged in scAAV-DJ.

[0065] FIGS. 41A-41C. Similar to FIG. 40, FIG. 41A shows representative images of neuronal morphology across stem-cell derived motor neuron treated with indicated scAAV-DJ vector encoding specified amiRNA, embedded in miR100 or miR100_M backbone vector. There is no readily apparent alteration in neuronal morphology for any treatment compared to vehicle. Total number of Hoechst+ nuclei (FIG. 41B) and the % of total nuclei that are Isl1+ (FIG. 41C) in AAV treated stem-cell derived motor neurons was quantified.

[0066] FIG. 42. Shows ‘volcano plots’ of RNAseq data, comparing gene expression in neurons treated with active amiRNA versus their inactive, ‘9-11’ control counterparts. The 911 controls do not reduce ATXN2 levels, but differ only by 3 nucleotides (bases 9, 10 and 11) from the active amiRNAs. Off-target effects of the amiRNAs not involving bases 9, 10 and 11 may therefore be conserved with the cognate non-911 control amiRNA, and the comparison can be considered to enrich the ‘on-target’ transcriptional impact of lowering Atxn2 levels. By far the most robust transcriptional effect observed in comparisons of miR100_1755 and miR100_2945 versus their 911 controls is ATXN2. In the plots, each point represents a gene (counts for different transcripts are collapsed gene-wise); the y-axis represents the nominal p value; the x-axis the log₂ fold change for gene expression between conditions. Data is derived from n=5-6 biological replicates per treatment. Neurons were treated with a dose of 1E4 vector genomes/cell, and RNA collected for RNAseq (quantseq) 7 days later.

[0067] FIG. 43. Panel of ‘volcano plots’ comparing each indicated amiR AAV treatment, with the same treatment conditions described as in FIG. 42, to all other amiRNA treatments shown (n=6 replicates/condition). Axes are as in FIG. 42; horizontal dashed line represents the false discovery rate threshold of 10%. Here, what are plotted are predicted off-target transcripts (with detectable expression levels in this system) for each amiR, that is transcripts with complementarity to bases 2-18 of the guide sequence with 2 or fewer mismatches. For most of the amiRNAs, none or only very few of the predicted off-targets are downregulated relative to the set of other amiRNAs, and exceed the 10% false discovery rate threshold.

[0068] FIG. 44. Plot of Atxn2 mRNA versus biodistribution of ATXN2 amiRNA expressing vectors (miR1-1-1784 (left) and miR100-3330 (right)) from mice dosed intrastriatally with vectors expressing indicated amiRNA AAV construct. Each point represents RT-ddPCR mRNA and vector distribution data from RNA and DNA isolated from an individual striatal biopsy, taking the average of Atxn2/Gusb and Atxn2/Tbp droplet ratios, normalized to vehicle treated animals. Multiple distinct vector formats are included, all with one version of the H1 promoter and various stuffer sequences.

[0069] FIGS. 45A-45B. Plot of Taqman qPCR data from striatal biopsies of animals dosed with indicated amiRNA AAV constructs (miR1784—FIG. 45A; miR3330—FIG. 45B). For each striatal biopsy assessed, two data points are shown: the y-axis plots the CT threshold difference between amplification of cDNA from an exogenous amiR and an endogenous miR, miR124; or the difference between amplification of two endogenous miRs. The x-axis shows the (log-base-2 transform of) vector distribution data, as in FIG. 44. Dashed lines are linear fits. Note that the relationship between CT and expression is of a form similar to expression ˜2\hat{ }^{CT}, consistent with the apparent linear relationship between CT difference and log₂ (vector genomes/diploid genome).

[0070] FIG. 46. qPCR data (a subset of the data shown in FIG. 45) is plotted against small RNAseq quantification of exogenous amiR expression/total miR expression, for RNA deriving from the same striatal punch biopsies. The relationship between the delta CT of exogenous amiR versus endogenous miR and small RNAseq quantification is separately fit to a linear model (linear regression) for each of the indicated amiRs. The slope of fits for the qPCR versus small RNAseq for the two amiRs are similar, and the fits are good as quantified by residuals, R².

[0071] FIG. 47. This graph shows use of the linear model in FIG. 46 to derive a predicted absolute amiR expression level, as a function of total miR expression, for the remaining samples that only had amiR expression measured by qPCR. This predicted amiR expression level is plotted on the x-axis. Each point represents an individual striatal punch biopsy. The y-axis represents the RT-ddPCR quantified Atxn2 mRNA level for that biopsy, same as in FIG. 44. A loess fit is used to separately fit a curve to data from biopsies from animals dosed with miR1-1.1784 expressing AAVs (black filled circles, dashed line); or miR100.3330 expressing AAVs (open diamonds; dotted line).

[0072] FIGS. 48A-48B. Liver enzyme data, alanine transaminase (ALT) (FIG. 48A) and aspartate aminotransferase (AST) (FIG. 48B) from blood collected from the submandibular vein, at 2 or 3 weeks after intravenous dosing of AAVs expressing indicated amiRs. Naïve animals were monitored in parallel.

[0073] FIG. 49. Plot of Atxn2 mRNA knockdown and vector distribution, as in FIG. 44, in striatal biopsies from animals dosed with AAVs expressing indicated amiRNAs. Lines represent loess (locally estimated scatterplot smoothing) fits for each series, implemented in R (stats::loess).

[0074] FIGS. 50A-50B. Expression of amiRNAs in tissue from animals dosed with AAVs expressing indicated amiRNAs. Liver tissue was analyzed from animals dosed intravenously (FIG. 50A); striatal tissue was analyzed from animals dosed via intrastriatal injection (FIG. 50B). amiRNA expression is plotted as normalized to total miRNA expression.

[0075] FIG. 51. Plot showing 5′ end homogeneity of processed miRNAs in striatal tissue in animals dosed intrastriatally. The y-axis (log₁₀ scale) plots cumulative sequencing reads, across all samples (n=4/AAV), for mature amiRNAs initiating at the ‘expected’ position 0, 5′ of the expected start site (negative numbers) or 3′ of the expected start site (positive numbers). For all of these amiRs, the vast majority of mature processed amiRNAs initiate at the expected start site.

[0076] FIGS. 52A-52D. (Top) Diagrams of representative predicted folding structures (mfold) of amiRNAs miR100_1755 (FIG. 52A), miR100_2586 (FIG. 52B), miR100_2945 (FIG. 52C), and miR100_3330 (FIG. 52D), embedded in miR100 backbone. Arrow indicates typical start position of processed miRNA guide strand. (Bottom) Observed small RNAseq sequencing reads. On the left are observed sequences, on the right the number of observations across all samples (n=3-4 liver, n=6 striatal biopsy). Note that the sequence reads are DNA, and in the corresponding miRNA the sequence would be generated by substituting “U” bases for “T” in the reads. A small number of sequences were fusions between the amiR and endogenous miRs, but these are considered to be artifacts of the ligation reaction during the small RNAseq procedure and were excluded. By comparing the observed sequences to the pri-miRNA sequence on top, it. An be noted that in some cases 3′ modifications are occurring, such as addition of ‘A’ or ‘U’ bases (‘T’ in the DNA sequencing reads) at the 3′ terminus of the amiRNA.

[0077] FIGS. 53A-53C show knockdown of Ataxin-2 protein in vivo after AAV9 vectorized miRNA delivery into cerebrospinal fluid. As in FIG. 22, AAVs encoding miRNAs XD-14792 or XD-14887, embedded in the miR-1-1 backbone, or a control construct lacking a miRNA, were dosed, in this case injected bilaterally intracerebroventricularly (ICV) in postnatal day 0 mice, 3 microliters per hemisphere. amiRNAs were expressed either under the control of the neuron-specific Synapsin promoter (as in nucleotides 1128-1575 of SEQ ID NO:622 or nucleotides 1128-1575 of SEQ ID NO:623), or the ubiquitous CAG promoter. Brain tissue (cortex) was harvested at indicated timepoint after injection. (FIG. 53A) Diagrams are shown of the expression cassettes used. (FIG. 53B) Representative immunoblot from Western analysis, similar to FIG. 22. Immunoblotting was performed against Ataxin-2, Beta-actin and GFP. For each treatment dose administered per hemisphere is listed, calculated by qPCR titering against the GFP region in the vector genome. In FIG. 53C, quantification of signal intensity of Atxn2 protein or GFP protein, normalized to total protein signal intensity (Revert 700, Licor), are shown. Atxn2 signal is scaled to the average of CAG-MCS and SYN-MCS controls at the indicated times, and GFP signal is scaled to the GFP maximum for the 4 week timepoint or to the average GFP signal of multiple CAG-MCS vector IV dosed liver samples that were loaded onto each Western blot for the 8 week timepoint. Each point represents data from an individual cortex (from a single animal), averaging across technical replicates. Error bars show standard deviation across technical replicates. A reduction in Atxn2 levels relative to control AAV vectors (MCS) is apparent for CAG vectors expressing the XD-14792 miR at 4 and 8 week timepoints, and for the 8 week timepoint for vectors with the Synapsin promoter.

[0078] FIGS. 54A-54B show representative immunofluorescence micrographs of tissue sections of cortex and cerebellum from animals dosed i.c.v. with AAV9 control or amiRNA vectors expressing (XD-14792 in miR-1-1 backbone, SEQ ID NO:1133), as in FIG. 53. Red corresponds to indirect immunofluorescence signal for anti-Atxn2 antibodies; Green to anti-GFP signal; and blue are nuclei (Dapi stained). In FIG. 54A, presumptive layer 5 cortical pyramidal neurons are seen, with apical dendrites projecting up in the image. Intensity from the GFP reporter is present in neurons, which are likely transduced with the AAV. On the left, GFP-expressing neurons in the animal transduced with the control amiRNA also have strong Atxn2 (red) signal, and neurons can be clearly seen with both GFP and Atxn2 signal. On the right, which corresponds to an image of tissue from an animal dosed with an ATXN2 amiRNA (XD-14792 in miR-1-1 backbone, SEQ ID NO:1133) expressing vector, by contrast, neurons with strong GFP intensity do not also have strong Atxn2 intensity, and overall the number of neurons with strong Atxn2 signal appears to be reduced. FIG. 54B shows similar results as FIG. 54A, but captures Purkinje cells in the cerebellum. On the right, the image shows Cerebellar tissue from an animal injected with Atxn2 amiRNA (XD-14792 in miR-1-1 backbone, SEQ ID NO:1133) expressing vector. GFP labeled, AAV transduced Purkinje cells do not have strong Atxn2 signal, whereas Purkinje cells lacking GFP transduction have strong Atxn2 expression. By contrast, on the left, which corresponds to an image from an animal dosed with control vector, cells with GFP signal also have Atxn2 signal.

### DETAILED DESCRIPTION

[0079] Expansions of ATXN2 polyglutamine repeat to a length of 34 or longer causes spinocerebellar ataxia type 2 (SCA2). Moreover, intermediate length polyglutamine expansions in ATXN2 increase risk of ALS. Reduction of ATXN2 levels has been demonstrated to have therapeutic benefit in animal models of spinocerebellar ataxia-2 and ALS. Knocking down the ATXN2 protein using nucleic acid based therapies alleviates the progressive neurodegeneration that occurs in animal models expressing a variant of the human ATXN2 containing an expanded polyglutamine repeat. In an animal model of ALS, which overexpresses the TDP-43 protein, a component of the most common neuropathology found in patients with ALS, animals normally develop a progressive death of motor neurons. However, breeding these animals with ATXN2 knock out mice dramatically increased survival time (Elden et al., Nature (2010) 466:7310). Similarly, reducing ATXN2 protein levels by introducing antisense oligonucleotide nucleic acids also increased survival of TDP-43 transgenic mice. Lowering ATXN2 levels markedly increased lifespan and improved motor function in TDP-43 transgenic mice and decreased the burden of TDP-43 inclusions. AXTN2 may modulate toxicity by affecting the aggregation propensity of TDP-43. TDP-43 proteinopathy has also been observed in a number of neurodegenerative diseases, including ALS, FTD, primary lateral sclerosis, progressive muscular atrophy, limbic-predominant age-related TDP-43 encephalopathy, chronic traumatic encephalopathy, dementia with Lewy bodies, corticobasal degeneration, progressive supranuclear palsy (PSP), dementia Parkinsonism ALS complex of guam (G-PDC), Pick's disease, hippocampal sclerosis, Huntington's disease, Parkinson's disease, and Alzheimer's disease. Thus, reducing ATXN2 levels may be useful for treating neurodegenerative diseases where ATXN2 is a causative agent (e.g., SCA2), as well as neurodegenerative diseases where ATXN2 is not the causative agent but modifies TDP-43 pathological aggregation.

[0080] Aspects of the invention relate to inhibitory nucleic acids (e.g., siRNAs, shRNAs, miRNAs, including artificial miRNAs) that when administered to a subject reduce the expression or activity of Ataxin-2 in the subject. Accordingly, compositions and methods provided in the present disclosure are useful for the treatment of neurodegenerative diseases, including spinocerebellar ataxia type 2 (SCA2), amyotrophic lateral sclerosis (ALS), Alzheimer's frontotemporal dementia (FTD), parkinsonism, and conditions associated with TDP-43 proteinopathies.

[0081] Prior to setting forth this disclosure in more detail, it may be helpful to an understanding thereof to provide definitions of certain terms to be used herein. Additional definitions are set forth throughout this disclosure.

[0082] In the present description, any concentration range, percentage range, ratio range, or integer range is to be understood to include the value of any integer within the recited range and, when appropriate, fractions thereof (such as one tenth and one hundredth of an integer), unless otherwise indicated. Also, any number range recited herein relating to any physical feature, such as polymer subunits, size or thickness, are to be understood to include any integer within the recited range, unless otherwise indicated. As used herein, the term “about” means±20% of the indicated range, value, or structure, unless otherwise indicated. It should be understood that the terms “a” and “an” as used herein refer to “one or more” of the enumerated components. The use of the alternative (e.g., “or”) should be understood to mean either one, both, or any combination thereof of the alternatives. As used herein, the terms “include,” “have” and “comprise” are used synonymously, which terms and variants thereof are intended to be construed as non-limiting.

[0083] As used herein, the term “nucleic acid” or “polynucleotide” refer to any nucleic acid polymer composed of covalently linked nucleotide subunits, such as polydeoxyribonucleotides or polyribonucleotides. Examples of nucleic acids include RNA and DNA.

[0084] As used herein, “RNA” refers to a molecule comprising one or more ribonucleotides and includes double-stranded RNA, single-stranded RNA, isolated RNA, synthetic RNA, recombinant RNA, as well as modified RNA that differs from naturally-occurring RNA by the addition, deletion, substitution, and/or alternation of one or more nucleotides. Nucleotides of RNA molecules may comprise standard nucleotides or non-standard nucleotides, such as non-naturally occurring nucleotides or chemically synthesized nucleotides.

[0085] As used herein, “DNA” refers to a molecule comprising one or more deoxyribonucleotides and includes double-stranded DNA, single-stranded DNA, isolated DNA, synthetic DNA, recombinant DNA, as well as modified DNA that differs from naturally-occurring DNA by the addition, deletion, substitution, and/or alteration of one or more nucleotides. Nucleotides of DNA molecules may comprise standard nucleotides or non-standard nucleotides, such as non-naturally occurring nucleotides or chemically synthesized nucleotides.

[0086] “Isolated” refers to a substance that has been isolated from its natural environment or artificially produced. As used herein with respect to a cell, “isolated” refers to a cell that has been isolated from its natural environment (e.g., from a subject, organ, tissue, or bodily fluid). As used herein with respect to a nucleic acid, “isolated” refers to a nucleic acid that has been isolated or purified from its natural environment (e.g., from a cell, cell organelle, or cytoplasm), recombinantly produced, amplified, or synthesized. In embodiments, an isolated nucleic acid includes a nucleic acid contained within a vector.

[0087] As used herein, the term “wild-type” or “non-mutant” form of a gene refers to a nucleic acid that encodes a protein associated with normal or non-pathogenic activity (e.g., a protein lacking a mutation, such as a repeat region expansion that results in higher risk of developing, onset, or progression of a neurodegenerative disease).

[0088] As used herein, the term “mutation” refers to any change in the structure of a gene, e.g., gene sequence, resulting in an altered form of the gene, which may be passed onto subsequent generations (hereditary mutation) or not (somatic mutation). Gene mutations include the substitution, insertion, or deletion of a single base in DNA or the substitution, insertion, deletion, or rearrangement of multiple bases or larger sections of genes or chromosomes, including repeat expansions.

[0089] As used herein, the term “Ataxin 2” or “ATNX2” refers to a protein encoded by the ATXN2 gene, which contains a polyglutamine (polyQ, CAG repeat) tract. ATXN2 gene or transcript may refer to normal alleles of ATXN2, which usually have 22 or 23 repeats, or mutated alleles having intermediate (˜24-32 repeats) or longer repeat expansions (˜33 to >100 repeats). In some embodiments, ATXN2 refers to mammalian ATNX2, including human ATXN2. In some embodiments, wild-type ATXN2 refers to a protein sequence of Q99700.2 as set forth in SEQ ID NO:1 or naturally occurring variants thereof. In some embodiments, wild-type ATXN2 nucleic acid refers to a nucleic acid sequence of NM_002973.3 (SEQ ID NO:2), ENST00000377617.7, ENST00000550104.5, ENST00000608853.5, or ENST00000616825.4, or naturally occurring variants thereof.

[0090] As used herein, the term “inhibitory nucleic acid” refers to a nucleic acid that comprises a guide strand sequence that hybridizes to at least a portion of a target nucleic acid, e.g., ATXN2 RNA, mRNA, pre-mRNA, or mature mRNA, and inhibits its expression or activity. An inhibitory nucleic acid may target a protein coding region (e.g., exon) or non-coding region (e.g., 5′UTR, 3′UTR, intron, etc.) of a target nucleic acid. In some embodiments, an inhibitory nucleic acid is a single stranded or double stranded molecule. An inhibitory nucleic acid may further comprise a passenger strand sequence on a separate strand (e.g., double stranded duplex) or in the same strand (e.g., single stranded, self-annealing duplex structure). In some embodiments, an inhibitory nucleic acid is an RNA molecule, such as a siRNA, shRNA, miRNA, or dsRNA.

[0091] As used herein, a “microRNA” or “miRNA” refers to a small non-coding RNA molecule capable of mediating silencing of a target gene by cleavage of the target mRNA, translational repression of the target mRNA, target mRNA degradation, or a combination thereof. Typically, miRNA is transcribed as a hairpin or stem-loop (e.g., having a self-complementary, single-stranded backbone) duplex structure, referred to as a primary miRNA (pri-miRNA), which is enzymatically processed (e.g., by Drosha, DGCR8, Pasha, etc.) into a pre-miRNA. Pre-miRNA is exported into the cytoplasm, where it is enzymatically processed by Dicer to produce a miRNA duplex with the passenger strand and then a single-stranded mature miRNA molecule, which is subsequently loaded into the RNA-induced silencing complex (RISC). Reference to a miRNA may include synthetic or artificial miRNAs.

[0092] As used herein, a “synthetic miRNA” or “artificial miRNA” or “amiRNA” refers to an endogenous, modified, or synthetic pri-miRNA or pre-miRNA (e.g., miRNA backbone or scaffold) in which the endogenous miRNA guide sequence and passenger sequence within the stem sequence have been replaced with a miRNA guide sequence and a miRNA passenger sequence that direct highly efficient RNA silencing of the targeted gene (see, e.g., Eamens et al. (2014), Methods Mol. Biol. 1062:211-224). In some embodiments, the nature of the complementarity of the guide and passenger sequences (e.g., number of bases, position of mismatches, types of bulges, etc.) can be similar or different from the nature of complementarity of the guide and passenger sequences in the endogenous miRNA backbone upon which the synthetic miRNA is constructed.

[0093] As used herein, the term “microRNA backbone,” “miR backbone,” “microRNA scaffold,” or “miR scaffold” refers to a pri-miRNA or pre-miRNA scaffold, with the stem sequence replaced by a miRNA of interest, and is capable of producing a functional, mature miRNA that directs RNA silencing at the gene targeted by the miRNA of interest. A miR backbone comprises a 5′ flanking region (also referred to 5′ miR context, ≥9 nucleotides), a stem region comprising the miRNA duplex (guide strand sequence and passenger strand sequence) and basal stem (5′ and 3′, each about 4-13 nucleotides), at least one loop motif region including the terminal loop (≥10 nucleotides for terminal loop), a 3′ flanking region (also referred to 3′ miR context, ≥9 nucleotides), and optionally one or more bulges in the stem. A miR backbone may be derived completely or partially from a wild type miRNA scaffold or be a completely artificial sequence.

[0094] As used herein, the term “antisense strand sequence” or “guide strand sequence” of an inhibitory nucleic acid refers to a sequence that is substantially complementary (e.g., at least 45%, 50%, 55%, 60%, 65%, 70%, 75%, 80%, 85%, 90%, 95%, or 100% complementary) to a region of about 10-50 nucleotides (e.g., about 15-30, 16-25, 18-23, or 19-22 nucleotides) of the mRNA of the gene targeted for silencing. The antisense sequence is sufficiently complementary to the target mRNA sequence to direct target-specific silencing, e.g., to trigger the destruction of the target mRNA by the RNAi machinery or process. In some embodiments, the antisense sequence or guide strand sequence refers to the mature sequence remaining following cleavage by Dicer.

[0095] As used herein, the term “sense sequence” or “passenger strand sequence” of an inhibitory nucleic acid refers to a sequence that is homologous to the target mRNA and partially or completely complementary to the antisense strand sequence or guide strand sequence of an inhibitory nucleic acid. The antisense strand sequence and sense strand sequence of an inhibitory nucleic acid are hybridized to form a duplex structure (e.g., forming a double-stranded duplex or single-stranded self-annealing duplex structure). In some embodiments, the sense sequence or passenger strand sequence refers to the mature sequence remaining following cleavage by Dicer.

[0096] As used herein, a “duplex,” when used in reference to an inhibitory nucleic acid, refers to two nucleic acid strands (e.g., a guide strand and passenger strand) hybridizing together to form a duplex structure. A duplex may be formed by two separate nucleic acid strands or by a single nucleic acid strand having a region of self-complementarity (e.g., hairpin or stem-loop).

[0097] As used herein, the term “complementary” refers to the ability of polynucleotides to form base pairs with each other. Base pairs are typically formed by hydrogen bonds between nucleotide subunits in antiparallel polynucleotide strands or a single, self-annealing polynucleotide strand. Complementary polynucleotide strands can form base pairs in the Watson-Crick manner (e.g., A to T, A to U, C to G), or in any other manner that allows for the formation of duplexes. As apparent to skilled persons in the art, when using RNA as opposed to DNA, uracil rather than thymine is the base that is considered to be complementary to adenosine. Furthermore, when a “U” is denoted in the context of the present invention, the ability to substitute a “T” is understood, unless otherwise stated. Complementarity also encompasses Watson-Crick base pairing between non-modified and modified nucleobases (e.g., 5-methyl cytosine substituted for cytosine). Full complementarity, perfect complementarity or 100% complementarity between two polynucleotide strands is where each nucleotide of one polynucleotide strand can form hydrogen bond with a nucleotide unit of a second polynucleotide strand. % complementarity refers to the number of nucleotides of a contiguous nucleotide sequence in a nucleic acid molecule that are complementary to an aligned reference sequence (e.g., a target mRNA, passenger strand), divided by the total number of nucleotides and multiplying by 100. In such an alignment, a nucleobase/nucleotide which does not form a base pair is called a mismatch. Insertions and deletions are not permitted in calculating % complementarity of a contiguous nucleotide sequence. It is understood by skilled persons in the art that in calculating complementarity, chemical modifications to nucleobases are not considered as long as the Watson-Crick base pairing capacity of the nucleobase is retained (e.g., 5-methyl cytosine is considered the same as cytosine for the purpose of calculating % complementarity).

[0098] The “percent identity” between two or more nucleic acid sequences refers to the proportion nucleotides of a contiguous nucleotide sequence in a nucleic acid molecule that are shared by a reference sequence (i.e., % identity=number of identical nucleotides/total number of nucleotides in the aligned region (e.g., the contiguous nucleotide sequence)×100). Insertions and deletions are not permitted in the calculation of % identity of a contiguous nucleotide sequence. It is understood by skilled persons in the art that in calculating identity, chemical modifications to nucleobases are not considered as long as the Watson-Crick base pairing capacity of the nucleobase is retained (e.g., 5-methyl cytosine is considered the same as cytosine for the purpose of calculating % identity).

[0099] As used herein, the term “hybridizing” or “hybridizes” refers to two nucleic acids strands forming hydrogen bonds between base pairs on antiparallel strands, thereby forming a duplex. The strength of hybridization between two nucleic acid strands may be described by the melting temperature (Tₘ), defined as at a given ionic strength and pH, the temperature at which 50% of a target sequence hybridizes to a complementary polynucleotide.

[0100] As used herein, “expression construct” refers to any type of genetic construct containing a nucleic acid (e.g., transgene) in which part or all of the nucleic acid encoding sequence is capable of being transcribed. In some embodiments, expression includes transcription of the nucleic acid, for example, to generate a biologically-active polypeptide product or inhibitory RNA (e.g., siRNA, shRNA, miRNA) from a transcribed gene. In some embodiments, the transgene is operably linked to expression control sequences.

[0101] As used herein, the term “transgene” refers to an exogenous nucleic acid that has been transferred naturally or by genetic engineering means into another cell and is capable of being transcribed, and optionally translated.

[0102] As used herein, the term “gene expression” refers to the process by which a nucleic acid is transcribed from a nucleic acid molecule, and often, translated into a peptide or protein. The process can include transcription, post-transcriptional control, post-transcriptional modification, translation, post-translational control, post translational modification, or any combination thereof. Reference to a measurement of “gene expression” may refer to measurement of the product of transcription (e.g., RNA or mRNA), the product of translation (e.g., peptides or proteins).

[0103] As used herein, the term “inhibit expression of a gene” means to reduce, down-regulate, suppress, block, lower, or stop expression of the gene. The expression product of a gene can be a RNA molecule transcribed from the gene (e.g., an mRNA) or a polypeptide translated from an mRNA transcribed from the gene. Typically a reduction in the level of an mRNA results in a reduction in the level of a polypeptide translated therefrom. The level of expression may be determined using standard techniques for measuring mRNA or protein.

[0104] As used herein, “vector” refers to a genetic construct that is capable of transporting a nucleic acid molecule (e.g., transgene encoding inhibitory nucleic acid) between cells and effecting expression of the nucleic acid molecule when operably-linked to suitable expression control sequences. Expression control sequences may include transcription initiation, termination, promoter and enhancer sequences; efficient RNA processing signals such as splicing and polyadenylation (polyA) signals; sequences that stabilize cytoplasmic mRNA; sequences that enhance translation efficiency (i.e., Kozak consensus sequence); sequences that enhance protein stability; and when desired, sequences that enhance secretion of the encoded product. The vector may be a plasmid, phage particle, transposon, cosmid, phagemid, chromosome, artificial chromosome, virus, virion, etc. Once transformed into a suitable host cell, the vector may replicate and function independently of the host genome, or may, in some instances, integrate into the genome itself.

[0105] As used herein, “host cell” refers to any cell that contains, or is capable of containing a composition of interest, e.g., an inhibitory nucleic acid. In embodiments, a host cell is a mammalian cell, such as a rodent cell, (mouse or rat) or primate cell (monkey, chimpanzee, or human). In embodiments, a host cell may be in vitro or in vivo. In embodiments, a host cell may be from an established cell line or primary cells. In embodiments, a host cell is a cell of the CNS, such as a neuron, glial cell, astrocyte, and microglial cell.

[0106] As used herein, “neurodegenerative disease” or “neurodegenerative disorder” refers to diseases or disorders that exhibit neural cell death as a pathological state. A neurodegenerative disease may exhibit chronic neurodegeneration, e.g., slow, progressive neural cell death over a period of several years, or acute neurodegeneration, e.g., sudden onset or neural cell death. Examples of chronic, neurodegenerative diseases include Alzheimer's disease, Parkinson's disease, Huntington's disease, spinocerebellar ataxia type 2 (SCA2), frontotemporal dementia (FTD), and amyotrophic lateral schlerosis (ALS). Chronic neurodegenerative diseases include diseases that feature TDP-43 proteinopathy, which is characterized by nucleus to cytoplasmic mislocalization, deposition of ubiquitinated and hyper-phosphorylated TDP-43 into inclusion bodies, protein truncation leading to formation of toxic C-terminal TDP-43 fragments, and protein aggregation. TDP-43 proteinopathy diseases include ALS, FTD, primary lateral sclerosis, progressive muscular atrophy, limbic-predominant age-related TDP-43 encephalopathy, chronic traumatic encephalopathy, dementia with Lewy bodies, corticobasal degeneration, progressive supranuclear palsy (PSP), dementia Parkinsonism ALS complex of guam (G-PDC), Pick's disease, hippocampal sclerosis, Huntington's disease, Parkinson's disease, and Alzheimer's disease. Acute neurodegeneration may be caused by ischemia (e.g., stroke, traumatic brain injury), axonal transection by demyelination or trauma (e.g., spinal cord injury or multiple sclerosis). A neurodegenerative disease may exhibit death of mainly one type of neuron or of multiple types of neurons.

[0107] As used herein, “subject,” “patient,” and “individual” are used interchangeably herein and refer to living organisms (e.g., mammals) selected for treatment or therapy. Examples of subjects include human and non-human mammals, such as primates (monkey, chimpanzee), cows, horses, sheep, dogs, cats, rats, mice, guinea pigs, pigs, and transgenic species thereof.

### Inhibitory Nucleic Acids

[0108] In one aspect, the disclosure provides isolated inhibitory nucleic acids that inhibit expression or activity of Ataxin 2 (ATXN2). The inhibitory nucleic acid is a nucleic acid that specifically binds (e.g., hybridizes to) at least a portion of the ATXN2 nucleic acid, such as an ATXN2 RNA, pre-mRNA, mRNA, and inhibits its expression or activity. In some embodiments, the inhibitory nucleic acid is complementary to a protein coding region or non-coding region (e.g., 5′UTR, 3′UTR, intron, etc.) of ATXN2. In some embodiments, the inhibitory nucleic acid is complementary to a wild type ATXN2 nucleic acid or a naturally occurring variant thereof. In some embodiments, the ATXN2 gene encodes a polypeptide identified by NCBI Reference Sequence NP_002964.4 or NP_002964.3. In some embodiments, an ATXN2 transcript comprises the sequence set forth in SEQ ID NO:2 or encodes an amino acid sequence set forth in SEQ ID NO:1. In some embodiments, the ATXN2 allele contains approximately 22 CAG trinucleotide repeats. In some embodiments, the ATXN2 allele has at least 22 CAG trinucleotide repeats, at least 24 CAG trinucleotide repeats, at least 27 CAG trinucleotide repeats, at least 30 CAG trinucleotide repeats, or at least 33 or more CAG trinucleotide repeats. In some embodiments, the inhibitory nucleic acid is single stranded or double-stranded. In some embodiments, the inhibitory nucleic acid is a siRNA, shRNA, miRNA, or dsRNA.

[0109] In some embodiments, the inhibitory nucleic acid is capable of inhibiting expression or activity of ATXN2 by at least 10%, at least 15%, at least 20%, at least 25%, at least 30%, at least 35%, at least 40%, at least 45%, at least 50%, at least 60%, at least 70%, at least 80%, at least 90% at least 95% or more in a cell compared to the expression level of ATXN2 in a cell that has not been contacted with the inhibitory nucleic acid. In some embodiments, the inhibitory nucleic acid is capable of inhibiting expression or activity of ATXN2 by 10-20%, 10-30%, 10-40%, 10-50%, 10-60%, 10-70%, 10-80%, 10-90%, 10-95%, 20-30%, 20-40%, 20-50%, 20-60%, 20-70%, 20-80%, 20-90%, 20-95%, 20-100%, 30-40%, 30-50%, 30-60%, 30-70%, 30-80%, 30-90%, 30-95%, 30-100%, 40-50%, 40-60%, 40-70%, 40-80%, 40-90%, 40-95%, 40-100%, 50-60%, 50-70%, 50-80%, 50-90%, 50-95%, 50-100%, 60-70%, 60-80%, 60-90%, 60-95%, 60-100%, 70-80%, 70-90%, 70-95%, 70-100%, 80-90%, 80-95%, 80-100%, 90-95%, 90-100% compared to the expression level of ATXN2 in a cell that has not been contacted with the inhibitory nucleic acid. Methods of measuring ATXN2 expression, e.g., levels of RNA, mRNA polypeptides, are known in the art including those described herein.

[0110] In some embodiments, the inhibitory nucleic acid comprises a guide strand sequence comprising or consisting of the nucleic acid sequence set forth in any one of the guide sequences in Tables 1, 3, 9, 11, 12, 13, 19, 23, 24, and 25. In some embodiments, the inhibitory nucleic acid comprises a guide strand sequence comprising or consisting of the nucleic acid sequence set forth in any one of SEQ ID NOS: 4, 6, 8, 10, 12, 14, 16, 18, 20, 22, 24, 26, 28, 30, 32, 34, 36, 38, 40, 42, 44, 46, 48, 50, 52, 54, 56, 58, 60, 62, 64, 66, 68, 70, 72, 74, 76, 78, 80, 82, 84, 86, 88, 90, 92, 94, 96, 98, 100, 102, 104, 106, 108, 110, 112, 114, 116, 118, 120, 124, 126, 128, 130, 132, 134, 136, 138, 140, 142, 144, 146, 148, 150, 152, 154, 156, 158, 160, 162, 164, 166, 168, 170, 172, 174, 176, 178, 180, 182, 184, 186, 188, 190, 192, 194, 196, 198, 200, 202, 204, 206, 208, 210, 212, 214, 216, 218, 220, 222, 224, 226, 228, 230, 232, 234, 236, 238, 240, 242, 244, 246, 248, 250, 252, 254, 256, 258, 260, 262, 264, 266, 268, 270, 272, 274, 276, 278, 280, 282, 284, 286, 288, 290, 292, 294, 296, 298, 300, 302, 304, 306, 308, 310, 312, 314, 316, 318, 320, 324, 326, 328, 330, 332, 334, 336, 338, 340, 342, 344, 346, 348, 350, 352, 354, 356, 358, 360, 362, 364, 366, 368, 370, 372, 374, 376, 378, 380, 382, 384, 386, 388, 390, 392, 394, 396, 398, 400, 402, 404, 406, 408, 410, 412, 414, 416, 418, 420, 422, 424, 426, 428, 430, 432, 434, 436, 1176-1288, 1811-1827, 2015, 2065, 2083, 2152, 2203, and 2209.

[0111] In some embodiments, the inhibitory nucleic acid comprises a guide strand sequence comprising or consisting of the nucleic acid sequence set forth in any one of the guide sequences in Tables 1, 3, 9, 11, 12, 13, 19, 23, 24, and 25, e.g., any one of SEQ ID NOS: 4, 6, 8, 10, 12, 14, 16, 18, 20, 22, 24, 26, 28, 30, 32, 34, 36, 38, 40, 42, 44, 46, 48, 50, 52, 54, 56, 58, 60, 62, 64, 66, 68, 70, 72, 74, 76, 78, 80, 82, 84, 86, 88, 90, 92, 94, 96, 98, 100, 102, 104, 106, 108, 110, 112, 114, 116, 118, 120, 124, 126, 128, 130, 132, 134, 136, 138, 140, 142, 144, 146, 148, 150, 152, 154, 156, 158, 160, 162, 164, 166, 168, 170, 172, 174, 176, 178, 180, 182, 184, 186, 188, 190, 192, 194, 196, 198, 200, 202, 204, 206, 208, 210, 212, 214, 216, 218, 220, 222, 224, 226, 228, 230, 232, 234, 236, 238, 240, 242, 244, 246, 248, 250, 252, 254, 256, 258, 260, 262, 264, 266, 268, 270, 272, 274, 276, 278, 280, 282, 284, 286, 288, 290, 292, 294, 296, 298, 300, 302, 304, 306, 308, 310, 312, 314, 316, 318, 320, 324, 326, 328, 330, 332, 334, 336, 338, 340, 342, 344, 346, 348, 350, 352, 354, 356, 358, 360, 362, 364, 366, 368, 370, 372, 374, 376, 378, 380, 382, 384, 386, 388, 390, 392, 394, 396, 398, 400, 402, 404, 406, 408, 410, 412, 414, 416, 418, 420, 422, 424, 426, 428, 430, 432, 434, 436, 1176-1288, 1811-1827, 2015, 2065, 2083, 2152, 2203, and 2209, with at least 1, 2, 3, 4, or 5 mismatches to the target ATXN2 mRNA sequence.

[0112] In some embodiments, the inhibitory nucleic acid comprises a guide strand sequence comprising or consisting of a nucleic acid sequence that is at least 60%, 70%, 75%, 80%, 85%, 90%, 95%, 97%, 99%, or 100% identical to any one of the guide sequences in Tables 1, 3, 9, 11, 12, 13, 19, 23, 24, and 25, e.g., any one of SEQ ID NOS: 4, 6, 8, 10, 12, 14, 16, 18, 20, 22, 24, 26, 28, 30, 32, 34, 36, 38, 40, 42, 44, 46, 48, 50, 52, 54, 56, 58, 60, 62, 64, 66, 68, 70, 72, 74, 76, 78, 80, 82, 84, 86, 88, 90, 92, 94, 96, 98, 100, 102, 104, 106, 108, 110, 112, 114, 116, 118, 120, 124, 126, 128, 130, 132, 134, 136, 138, 140, 142, 144, 146, 148, 150, 152, 154, 156, 158, 160, 162, 164, 166, 168, 170, 172, 174, 176, 178, 180, 182, 184, 186, 188, 190, 192, 194, 196, 198, 200, 202, 204, 206, 208, 210, 212, 214, 216, 218, 220, 222, 224, 226, 228, 230, 232, 234, 236, 238, 240, 242, 244, 246, 248, 250, 252, 254, 256, 258, 260, 262, 264, 266, 268, 270, 272, 274, 276, 278, 280, 282, 284, 286, 288, 290, 292, 294, 296, 298, 300, 302, 304, 306, 308, 310, 312, 314, 316, 318, 320, 324, 326, 328, 330, 332, 334, 336, 338, 340, 342, 344, 346, 348, 350, 352, 354, 356, 358, 360, 362, 364, 366, 368, 370, 372, 374, 376, 378, 380, 382, 384, 386, 388, 390, 392, 394, 396, 398, 400, 402, 404, 406, 408, 410, 412, 414, 416, 418, 420, 422, 424, 426, 428, 430, 432, 434, 436, 1176-1288, 1811-1827, 2015, 2065, 2083, 2152, 2203, and 2209.

[0113] In some embodiments, the inhibitory nucleic acid comprises a guide strand sequence comprising or consisting of at least 15, 16, 17, 18, 19, 20, 21, or 22 contiguous nucleotides of a sequence of any one of the guide sequences in Tables 1, 3, 9, 11, 12, 13, 19, 23, 24, and 25, e.g., any one of SEQ ID NOS: 4, 6, 8, 10, 12, 14, 16, 18, 20, 22, 24, 26, 28, 30, 32, 34, 36, 38, 40, 42, 44, 46, 48, 50, 52, 54, 56, 58, 60, 62, 64, 66, 68, 70, 72, 74, 76, 78, 80, 82, 84, 86, 88, 90, 92, 94, 96, 98, 100, 102, 104, 106, 108, 110, 112, 114, 116, 118, 120, 124, 126, 128, 130, 132, 134, 136, 138, 140, 142, 144, 146, 148, 150, 152, 154, 156, 158, 160, 162, 164, 166, 168, 170, 172, 174, 176, 178, 180, 182, 184, 186, 188, 190, 192, 194, 196, 198, 200, 202, 204, 206, 208, 210, 212, 214, 216, 218, 220, 222, 224, 226, 228, 230, 232, 234, 236, 238, 240, 242, 244, 246, 248, 250, 252, 254, 256, 258, 260, 262, 264, 266, 268, 270, 272, 274, 276, 278, 280, 282, 284, 286, 288, 290, 292, 294, 296, 298, 300, 302, 304, 306, 308, 310, 312, 314, 316, 318, 320, 324, 326, 328, 330, 332, 334, 336, 338, 340, 342, 344, 346, 348, 350, 352, 354, 356, 358, 360, 362, 364, 366, 368, 370, 372, 374, 376, 378, 380, 382, 384, 386, 388, 390, 392, 394, 396, 398, 400, 402, 404, 406, 408, 410, 412, 414, 416, 418, 420, 422, 424, 426, 428, 430, 432, 434, 436, 1176-1288, 1811-1827, 2015, 2065, 2083, 2152, 2203, and 2209, preferably wherein the guide strand sequence retains positions 2-7 (“seed sequence”) of the selected SEQ ID NO.

[0114] In some embodiments, the inhibitory nucleic acid comprises a guide strand sequence comprising or consisting of a sequence of any one of the guide sequences of Tables 1, 3, 9, 11, 12, 13, 19, 23, 24, and 25, e.g., any one of SEQ ID NOS: 4, 6, 8, 10, 12, 14, 16, 18, 20, 22, 24, 26, 28, 30, 32, 34, 36, 38, 40, 42, 44, 46, 48, 50, 52, 54, 56, 58, 60, 62, 64, 66, 68, 70, 72, 74, 76, 78, 80, 82, 84, 86, 88, 90, 92, 94, 96, 98, 100, 102, 104, 106, 108, 110, 112, 114, 116, 118, 120, 124, 126, 128, 130, 132, 134, 136, 138, 140, 142, 144, 146, 148, 150, 152, 154, 156, 158, 160, 162, 164, 166, 168, 170, 172, 174, 176, 178, 180, 182, 184, 186, 188, 190, 192, 194, 196, 198, 200, 202, 204, 206, 208, 210, 212, 214, 216, 218, 220, 222, 224, 226, 228, 230, 232, 234, 236, 238, 240, 242, 244, 246, 248, 250, 252, 254, 256, 258, 260, 262, 264, 266, 268, 270, 272, 274, 276, 278, 280, 282, 284, 286, 288, 290, 292, 294, 296, 298, 300, 302, 304, 306, 308, 310, 312, 314, 316, 318, 320, 324, 326, 328, 330, 332, 334, 336, 338, 340, 342, 344, 346, 348, 350, 352, 354, 356, 358, 360, 362, 364, 366, 368, 370, 372, 374, 376, 378, 380, 382, 384, 386, 388, 390, 392, 394, 396, 398, 400, 402, 404, 406, 408, 410, 412, 414, 416, 418, 420, 422, 424, 426, 428, 430, 432, 434, 436, 1176-1288, 1811-1827, 2015, 2065, 2083, 2152, 2203, and 2209, wherein 1, 2, 3, or 4 nucleotides at positions 19-22 differ from the selected SEQ ID NO (variant nucleotide(s)) such that the guide strand sequence is no longer complementary to the ATXN2 target sequence at the variant nucleotide(s).

[0115] In some embodiments, the inhibitory nucleic acid comprises a guide strand sequence of Table 12. In some embodiments, the inhibitory nucleic acid comprises a guide strand sequence comprising or consisting of the nucleic acid sequence set forth in any one of SEQ ID NOS: 12, 14, 40, 60, 100, 104, 108, 112, 124, 126, 128, 166, 198, 220, 242, 302, 306, 308, 330, 336, and 362. In some embodiments, the inhibitory nucleic acid comprises a guide strand sequence comprising or consisting of the nucleic acid sequence set forth in any one of SEQ ID NOS: 12, 14, 40, 60, 100, 104, 108, 112, 124, 126, 128, 166, 198, 220, 242, 302, 306, 308, 330, 336, and 362 with at least 1, 2, 3, 4, or 5 mismatches to the target ATXN2 mRNA sequence. In some embodiments, the inhibitory nucleic acid comprises a guide strand sequence comprising or consisting of a nucleic acid sequence that is at least 60%, 70%, 75%, 80%, 85%, 90%, 95%, 97%, 99%, or 100% identical to any one of SEQ ID NOS: 12, 14, 40, 60, 100, 104, 108, 112, 124, 126, 128, 166, 198, 220, 242, 302, 306, 308, 330, 336, and 362. In some embodiments, the inhibitory nucleic acid comprises a guide strand sequence comprising or consisting of at least 15, 16, 17, 18, 19, 20, 21, or 22 contiguous nucleotides of a sequence of any one of SEQ ID NOS: 12, 14, 40, 60, 100, 104, 108, 112, 124, 126, 128, 166, 198, 220, 242, 302, 306, 308, 330, 336, and 362, preferably wherein the guide strand sequence retains positions 2-7 (“seed sequence”) of the selected SEQ ID NO. In some embodiments, the inhibitory nucleic acid comprises a guide strand sequence comprising or consisting of a sequence of any one of SEQ ID NOS: 12, 14, 40, 60, 100, 104, 108, 112, 124, 126, 128, 166, 198, 220, 242, 302, 306, 308, 330, 336, and 362, wherein 1, 2, 3, or 4 nucleotides at positions 19-22 differ from the selected SEQ ID NO (variant nucleotide(s)) such that the guide strand sequence is no longer complementary to the ATXN2 target sequence at the variant nucleotide(s).

[0116] In some embodiments, the inhibitory nucleic acid comprises a guide strand sequence of Table 13. In some embodiments, the inhibitory nucleic acid comprises a guide strand sequence comprising or consisting of the nucleic acid sequence set forth in any one of SEQ ID NOS: 14, 40, 100, 108, 112, 128, 166, 198, 242, 308, 336, and 362. In some embodiments, the inhibitory nucleic acid comprises a guide strand sequence comprising or consisting of the nucleic acid sequence set forth in any one of SEQ ID NOS: 14, 40, 100, 108, 112, 128, 166, 198, 242, 308, 336, and 362 with at least 1, 2, 3, 4, or 5 mismatches to the target ATXN2 mRNA sequence. In some embodiments, the inhibitory nucleic acid comprises a guide strand sequence comprising or consisting of a nucleic acid sequence that is at least 60%, 70%, 75%, 80%, 85%, 90%, 95%, 97%, 99%, or 100% identical to any one of SEQ ID NOS: 14, 40, 100, 108, 112, 128, 166, 198, 242, 308, 336, and 362. In some embodiments, the inhibitory nucleic acid comprises a guide strand sequence comprising or consisting of at least 15, 16, 17, 18, 19, 20, 21, or 22 contiguous nucleotides of a sequence of any one of SEQ ID NOS: 14, 40, 100, 108, 112, 128, 166, 198, 242, 308, 336, and 362, preferably wherein the guide strand sequence retains positions 2-7 (“seed sequence”) of the selected SEQ ID NO. In some embodiments, the inhibitory nucleic acid comprises a guide strand sequence comprising or consisting of a sequence of any one of SEQ ID NOS: 14, 40, 100, 108, 112, 128, 166, 198, 242, 308, 336, and 362, wherein 1, 2, 3, or 4 nucleotides at positions 19-22 differ from the selected SEQ ID NO (variant nucleotide(s)) such that the guide strand sequence is no longer complementary to the ATXN2 target sequence at the variant nucleotide(s).

[0117] In some embodiments, the inhibitory nucleic acid comprises a guide strand sequence of Table 19. In some embodiments, the inhibitory nucleic acid comprises a guide strand sequence comprising or consisting of the nucleic acid sequence set forth in any one of SEQ ID NOS:1176-1288, 40, 108, and 166. In some embodiments, the inhibitory nucleic acid comprises a guide strand sequence comprising or consisting of the nucleic acid sequence set forth in any one of SEQ ID NOS:1176-1288, 40, 108, and 166, with at least 1, 2, 3, 4, or 5 mismatches to the target ATXN2 mRNA sequence. In some embodiments, the inhibitory nucleic acid comprises a guide strand sequence comprising or consisting of a nucleic acid sequence that is at least 60%, 70%, 75%, 80%, 85%, 90%, 95%, 97%, 99%, or 100% identical to any one of SEQ ID NOS:1176-1288, 40, 108, and 166. In some embodiments, the inhibitory nucleic acid comprises a guide strand sequence comprising or consisting of at least 15, 16, 17, 18, 19, 20, 21, or 22 contiguous nucleotides of a sequence of any one of SEQ ID NOS: 1176-1288, 40, 108, and 166, preferably wherein the guide strand sequence retains positions 2-7 (“seed sequence”) of the selected SEQ ID NO. In some embodiments, the inhibitory nucleic acid comprises a guide strand sequence comprising or consisting of a sequence of any one of SEQ ID NOS:1176-1288, 40, 108, and 166, wherein 1, 2, 3, or 4 nucleotides at positions 19-22 differ from the selected SEQ ID NO (variant nucleotide(s)) such that the guide strand sequence is no longer complementary to the ATXN2 target sequence at the variant nucleotide(s).

[0118] In some embodiments, the inhibitory nucleic acid comprises a guide strand sequence of Table 23. In some embodiments, the inhibitory nucleic acid comprises a guide strand sequence comprising or consisting of the nucleic acid sequence set forth in any one of SEQ ID NOS:1908-2007. In some embodiments, the inhibitory nucleic acid comprises a guide strand sequence comprising or consisting of the nucleic acid sequence set forth in any one of SEQ ID NOS:1908-2007, with at least 1, 2, 3, 4, or 5 mismatches to the target ATXN2 mRNA sequence. In some embodiments, the inhibitory nucleic acid comprises a guide strand sequence comprising or consisting of a nucleic acid sequence that is at least 60%, 70%, 75%, 80%, 85%, 90%, 95%, 97%, 99%, or 100% identical to any one of SEQ ID NOS:1908-2007. In some embodiments, the inhibitory nucleic acid comprises a guide strand sequence comprising or consisting of at least 15, 16, 17, 18, 19, 20, 21, or 22 contiguous nucleotides of a sequence of any one of SEQ ID NOS:1908-2007, preferably wherein the guide strand sequence retains positions 2-7 (“seed sequence”) of the selected SEQ ID NO. In some embodiments, the inhibitory nucleic acid comprises a guide strand sequence comprising or consisting of a sequence of any one of SEQ ID NOS:1908-2007, wherein 1, 2, 3, or 4 nucleotides at positions 19-22 differ from the selected SEQ ID NO (variant nucleotide(s)) such that the guide strand sequence is no longer complementary to the ATXN2 target sequence at the variant nucleotide(s).

[0119] In some embodiments, the inhibitory nucleic acid comprises a guide strand sequence of Table 24. In some embodiments, the inhibitory nucleic acid comprises a guide strand sequence comprising or consisting of the nucleic acid sequence set forth in any one of SEQ ID NOS:100, 112, 166, 202, 246, 306, 308, 314, 1180, 1185, 1196, 1200, 1211, 1213, 1215, 1216, 1224, 1811-1822, 1824-1827, 2015, 2065, 2083, 2152, 2203, and 2209. In some embodiments, the inhibitory nucleic acid comprises a guide strand sequence comprising or consisting of the nucleic acid sequence set forth in any one of SEQ ID NOS:100, 112, 166, 202, 246, 306, 308, 314, 1180, 1185, 1196, 1200, 1211, 1213, 1215, 1216, 1224, 1811-1822, 1824-1827, 2015, 2065, 2083, 2152, 2203, and 2209, with at least 1, 2, 3, 4, or 5 mismatches to the target ATXN2 mRNA sequence. In some embodiments, the inhibitory nucleic acid comprises a guide strand sequence comprising or consisting of a nucleic acid sequence that is at least 60%, 70%, 75%, 80%, 85%, 90%, 95%, 97%, 99%, or 100% identical to any one of SEQ ID NOS:100, 112, 166, 202, 246, 306, 308, 314, 1180, 1185, 1196, 1200, 1211, 1213, 1215, 1216, 1224, 1811-1822, 1824-1827, 2015, 2065, 2083, 2152, 2203, and 2209. In some embodiments, the inhibitory nucleic acid comprises a guide strand sequence comprising or consisting of at least 15, 16, 17, 18, 19, 20, 21, or 22 contiguous nucleotides of a sequence of any one of SEQ ID NOS:100, 112, 166, 202, 246, 306, 308, 314, 1180, 1185, 1196, 1200, 1211, 1213, 1215, 1216, 1224, 1811-1822, 1824-1827, 2015, 2065, 2083, 2152, 2203, and 2209, preferably wherein the guide strand sequence retains positions 2-7 (“seed sequence”) of the selected SEQ ID NO. In some embodiments, the inhibitory nucleic acid comprises a guide strand sequence comprising or consisting of a sequence of any one of SEQ ID NOS:100, 112, 166, 202, 246, 306, 308, 314, 1180, 1185, 1196, 1200, 1211, 1213, 1215, 1216, 1224, 1811-1822, 1824-1827, 2015, 2065, 2083, 2152, 2203, and 2209, wherein 1, 2, 3, or 4 nucleotides at positions 19-22 differ from the selected SEQ ID NO (variant nucleotide(s)) such that the guide strand sequence is no longer complementary to the ATXN2 target sequence at the variant nucleotide(s).

[0120] In some embodiments, the inhibitory nucleic acid comprises a guide strand sequence of Table 25. In some embodiments, the inhibitory nucleic acid comprises a guide strand sequence comprising or consisting of the nucleic acid sequence set forth in any one of SEQ ID NOS:1185, 1816, 1213, 1819, 2083, 1215, 1216, 1811, and 314. In some embodiments, the inhibitory nucleic acid comprises a guide strand sequence comprising or consisting of the nucleic acid sequence set forth in any one of SEQ ID NOS:1185, 1816, 1213, 1819, 2083, 1215, 1216, 1811, and 314, with at least 1, 2, 3, 4, or 5 mismatches to the target ATXN2 mRNA sequence. In some embodiments, the inhibitory nucleic acid comprises a guide strand sequence comprising or consisting of a nucleic acid sequence that is at least 60%, 70%, 75%, 80%, 85%, 90%, 95%, 97%, 99%, or 100% identical to any one of SEQ ID NOS:1185, 1816, 1213, 1819, 2083, 1215, 1216, 1811, and 314. In some embodiments, the inhibitory nucleic acid comprises a guide strand sequence comprising or consisting of at least 15, 16, 17, 18, 19, 20, 21, or 22 contiguous nucleotides of a sequence of any one of SEQ ID NOS:1185, 1816, 1213, 1819, 2083, 1215, 1216, 1811, and 314, preferably wherein the guide strand sequence retains positions 2-7 (“seed sequence”) of the selected SEQ ID NO. In some embodiments, the inhibitory nucleic acid comprises a guide strand sequence comprising or consisting of a sequence of any one of SEQ ID NOS:1185, 1816, 1213, 1819, 2083, 1215, 1216, 1811, and 314, wherein 1, 2, 3, or 4 nucleotides at positions 19-22 differ from the selected SEQ ID NO (variant nucleotide(s)) such that the guide strand sequence is no longer complementary to the ATXN2 target sequence at the variant nucleotide(s).

[0121] In some embodiments, the inhibitory nucleic acid comprises a guide strand sequence comprising or consisting of the nucleic acid sequence set forth in any one of SEQ ID NOS:1185, 1816, 1213, and 1811. In some embodiments, the inhibitory nucleic acid comprises a guide strand sequence comprising or consisting of the nucleic acid sequence set forth in any one of SEQ ID NOS:1185, 1816, 1213, and 1811, with at least 1, 2, 3, 4, or 5 mismatches to the target ATXN2 mRNA sequence. In some embodiments, the inhibitory nucleic acid comprises a guide strand sequence comprising or consisting of a nucleic acid sequence that is at least 60%, 70%, 75%, 80%, 85%, 90%, 95%, 97%, 99%, or 100% identical to any one of SEQ ID NOS:1185, 1816, 1213, and 1811. In some embodiments, the inhibitory nucleic acid comprises a guide strand sequence comprising or consisting of at least 15, 16, 17, 18, 19, 20, 21, or 22 contiguous nucleotides of a sequence of any one of SEQ ID NOS:1185, 1816, 1213, and 1811, preferably wherein the guide strand sequence retains positions 2-7 (“seed sequence”) of the selected SEQ ID NO. In some embodiments, the inhibitory nucleic acid comprises a guide strand sequence comprising or consisting of a sequence of any one of SEQ ID NOS:1185, 1816, 1213, and 1811, wherein 1, 2, 3, or 4 nucleotides at positions 19-22 differ from the selected SEQ ID NO (variant nucleotide(s)) such that the guide strand sequence is no longer complementary to the ATXN2 target sequence at the variant nucleotide(s).

[0122] In some embodiments, the inhibitory nucleic acid is an isolated siRNA duplex that targets ATXN2 mRNA to interfere with ATXN2 expression by mRNA degradation or translational inhibition. A siRNA duplex is a short, double stranded RNA comprising a guide strand, which is complementary to the target ATXN2 mRNA, and a passenger strand, which is homologous to the target ATNX2 mRNA. The guide strand and passenger strand hybridize together to form a duplex structure, and the guide strand has sufficient complementarity to the ATXN2 mRNA sequence to direct ATXN2-specific RNA interference. The guide strand of the siRNA duplex may be about 18 nucleotides, 19 nucleotides, 20 nucleotides, 21 nucleotides, 22 nucleotides, 23 nucleotides, 24 nucleotides, 25 nucleotides, 26 nucleotides, 27 nucleotides, 28 nucleotides, 29 nucleotides, or 30 nucleotides in length or 18-30, 18-29, 18-28, 18-27, 18-26, 18-25, 18-24, 18-23, 18-22, 18-20, 19-30, 19-29, 19-28, 19-27, 19-26, 19-25, 19-24, 19-23, 19-22, 19-21, 20-30, 20-29, 20-28, 20-27, 20-26, 20-25, 20-24, 20-23, 20-22, 21-30, 21-29, 21-28, 21-27, 21-26, 21-25, 21-24, 21-23, 22-30, 22-29, 22-28, 22-27, 22-26, 22-24, 23-30, 23-29, 23-28, 23-27, 23-26, 23-25, 24-30, 24-29, 24-28, 24-27, 24-26, 25-30, 25-29, 25-28, 25-27, 26-30, 26-29, 26-28, 27-30, 27-29, 28-30 nucleotides in length. The passenger strand of the siRNA duplex may be about 18 nucleotides, 19 nucleotides, 20 nucleotides, 21 nucleotides, 22 nucleotides, 23 nucleotides, 24 nucleotides, 25 nucleotides, 26 nucleotides, 27 nucleotides, 28 nucleotides, 29 nucleotides, or 30 nucleotides in length or 18-30, 18-29, 18-28, 18-27, 18-26, 18-25, 18-24, 18-23, 18-22, 18-20, 19-30, 19-29, 19-28, 19-27, 19-26, 19-25, 19-24, 19-23, 19-22, 19-21, 20-30, 20-29, 20-28, 20-27, 20-26, 20-25, 20-24, 20-23, 20-22, 21-30, 21-29, 21-28, 21-27, 21-26, 21-25, 21-24, 21-23, 22-30, 22-29, 22-28, 22-27, 22-26, 22-24, 23-30, 23-29, 23-28, 23-27, 23-26, 23-25, 24-30, 24-29, 24-28, 24-27, 24-26, 25-30, 25-29, 25-28, 25-27, 26-30, 26-29, 26-28, 27-30, 27-29, 28-30 nucleotides in length. In some embodiments, the siRNA duplex contains 2 or 3 nucleotide 3′ overhangs on each strand. In some embodiments, the 3′ overhangs are complementary to the ATXN2 transcript. In some embodiments, the guide strand and passenger strand of the siRNA duplex are at least 60%, 65%, 70%, 75%, 80%, 85%, 90%, 95%, 97%, or 100% complementary to each other, not including any nucleotides in overhang(s).

[0123] In some embodiments, the siRNA duplex comprises a guide strand sequence comprising or consisting of the nucleic acid sequence set forth in any one of the guide sequences of Tables 1, 3, 9, 11, 12, 13, 19, 23, 24, and 25, e.g., any one of SEQ ID NOS: 4, 6, 8, 10, 12, 14, 16, 18, 20, 22, 24, 26, 28, 30, 32, 34, 36, 38, 40, 42, 44, 46, 48, 50, 52, 54, 56, 58, 60, 62, 64, 66, 68, 70, 72, 74, 76, 78, 80, 82, 84, 86, 88, 90, 92, 94, 96, 98, 100, 102, 104, 106, 108, 110, 112, 114, 116, 118, 120, 124, 126, 128, 130, 132, 134, 136, 138, 140, 142, 144, 146, 148, 150, 152, 154, 156, 158, 160, 162, 164, 166, 168, 170, 172, 174, 176, 178, 180, 182, 184, 186, 188, 190, 192, 194, 196, 198, 200, 202, 204, 206, 208, 210, 212, 214, 216, 218, 220, 222, 224, 226, 228, 230, 232, 234, 236, 238, 240, 242, 244, 246, 248, 250, 252, 254, 256, 258, 260, 262, 264, 266, 268, 270, 272, 274, 276, 278, 280, 282, 284, 286, 288, 290, 292, 294, 296, 298, 300, 302, 304, 306, 308, 310, 312, 314, 316, 318, 320, 324, 326, 328, 330, 332, 334, 336, 338, 340, 342, 344, 346, 348, 350, 352, 354, 356, 358, 360, 362, 364, 366, 368, 370, 372, 374, 376, 378, 380, 382, 384, 386, 388, 390, 392, 394, 396, 398, 400, 402, 404, 406, 408, 410, 412, 414, 416, 418, 420, 422, 424, 426, 428, 430, 432, 434, 436, 1176-1288, 1811-1827, 2015, 2065, 2083, 2152, 2203, and 2209.

[0124] In some embodiments, the siRNA duplex comprises a guide strand sequence comprising or consisting of the nucleic acid sequence set forth in any one of the guide sequences of Tables 1, 3, 9, 11, 12, 13, 19, 23, 24, and 25, e.g., any one of SEQ ID NOS: 4, 6, 8, 10, 12, 14, 16, 18, 20, 22, 24, 26, 28, 30, 32, 34, 36, 38, 40, 42, 44, 46, 48, 50, 52, 54, 56, 58, 60, 62, 64, 66, 68, 70, 72, 74, 76, 78, 80, 82, 84, 86, 88, 90, 92, 94, 96, 98, 100, 102, 104, 106, 108, 110, 112, 114, 116, 118, 120, 124, 126, 128, 130, 132, 134, 136, 138, 140, 142, 144, 146, 148, 150, 152, 154, 156, 158, 160, 162, 164, 166, 168, 170, 172, 174, 176, 178, 180, 182, 184, 186, 188, 190, 192, 194, 196, 198, 200, 202, 204, 206, 208, 210, 212, 214, 216, 218, 220, 222, 224, 226, 228, 230, 232, 234, 236, 238, 240, 242, 244, 246, 248, 250, 252, 254, 256, 258, 260, 262, 264, 266, 268, 270, 272, 274, 276, 278, 280, 282, 284, 286, 288, 290, 292, 294, 296, 298, 300, 302, 304, 306, 308, 310, 312, 314, 316, 318, 320, 324, 326, 328, 330, 332, 334, 336, 338, 340, 342, 344, 346, 348, 350, 352, 354, 356, 358, 360, 362, 364, 366, 368, 370, 372, 374, 376, 378, 380, 382, 384, 386, 388, 390, 392, 394, 396, 398, 400, 402, 404, 406, 408, 410, 412, 414, 416, 418, 420, 422, 424, 426, 428, 430, 432, 434, 436, 1176-1288, 1811-1827, 2015, 2065, 2083, 2152, 2203, and 2209, with at least 1, 2, 3, 4, or 5 mismatches to the target ATXN2 mRNA sequence.

[0125] In some embodiments, the siRNA duplex comprises a guide strand sequence comprising or consisting of a nucleic acid sequence that is at least 60%, 70%, 75%, 80%, 85%, 90%, 95%, 97%, 99%, or 100% identical to any one of the guide sequences of Tables 1, 3, 9, 11, 12, 13, 19, 23, 24, and 25, e.g., any one of SEQ ID NOS: 4, 6, 8, 10, 12, 14, 16, 18, 20, 22, 24, 26, 28, 30, 32, 34, 36, 38, 40, 42, 44, 46, 48, 50, 52, 54, 56, 58, 60, 62, 64, 66, 68, 70, 72, 74, 76, 78, 80, 82, 84, 86, 88, 90, 92, 94, 96, 98, 100, 102, 104, 106, 108, 110, 112, 114, 116, 118, 120, 124, 126, 128, 130, 132, 134, 136, 138, 140, 142, 144, 146, 148, 150, 152, 154, 156, 158, 160, 162, 164, 166, 168, 170, 172, 174, 176, 178, 180, 182, 184, 186, 188, 190, 192, 194, 196, 198, 200, 202, 204, 206, 208, 210, 212, 214, 216, 218, 220, 222, 224, 226, 228, 230, 232, 234, 236, 238, 240, 242, 244, 246, 248, 250, 252, 254, 256, 258, 260, 262, 264, 266, 268, 270, 272, 274, 276, 278, 280, 282, 284, 286, 288, 290, 292, 294, 296, 298, 300, 302, 304, 306, 308, 310, 312, 314, 316, 318, 320, 324, 326, 328, 330, 332, 334, 336, 338, 340, 342, 344, 346, 348, 350, 352, 354, 356, 358, 360, 362, 364, 366, 368, 370, 372, 374, 376, 378, 380, 382, 384, 386, 388, 390, 392, 394, 396, 398, 400, 402, 404, 406, 408, 410, 412, 414, 416, 418, 420, 422, 424, 426, 428, 430, 432, 434, 436, 1176-1288, 1811-1827, 2015, 2065, 2083, 2152, 2203, and 2209.

[0126] In some embodiments, the siRNA duplex comprises a guide strand sequence comprising or consisting of at least 15, 16, 17, 18, 19, 20, 21, or 22 contiguous nucleotides of a sequence of any one of the guide sequences of Tables 1, 3, 9, 11, 12, 13, 19, 23, 24, and 25, e.g., any one of SEQ ID NOS: 4, 6, 8, 10, 12, 14, 16, 18, 20, 22, 24, 26, 28, 30, 32, 34, 36, 38, 40, 42, 44, 46, 48, 50, 52, 54, 56, 58, 60, 62, 64, 66, 68, 70, 72, 74, 76, 78, 80, 82, 84, 86, 88, 90, 92, 94, 96, 98, 100, 102, 104, 106, 108, 110, 112, 114, 116, 118, 120, 124, 126, 128, 130, 132, 134, 136, 138, 140, 142, 144, 146, 148, 150, 152, 154, 156, 158, 160, 162, 164, 166, 168, 170, 172, 174, 176, 178, 180, 182, 184, 186, 188, 190, 192, 194, 196, 198, 200, 202, 204, 206, 208, 210, 212, 214, 216, 218, 220, 222, 224, 226, 228, 230, 232, 234, 236, 238, 240, 242, 244, 246, 248, 250, 252, 254, 256, 258, 260, 262, 264, 266, 268, 270, 272, 274, 276, 278, 280, 282, 284, 286, 288, 290, 292, 294, 296, 298, 300, 302, 304, 306, 308, 310, 312, 314, 316, 318, 320, 324, 326, 328, 330, 332, 334, 336, 338, 340, 342, 344, 346, 348, 350, 352, 354, 356, 358, 360, 362, 364, 366, 368, 370, 372, 374, 376, 378, 380, 382, 384, 386, 388, 390, 392, 394, 396, 398, 400, 402, 404, 406, 408, 410, 412, 414, 416, 418, 420, 422, 424, 426, 428, 430, 432, 434, 436, 1176-1288, 1811-1827, 2015, 2065, 2083, 2152, 2203, and 2209, preferably wherein the guide strand sequence retains positions 2-7 (“seed sequence”) of the selected SEQ ID NO.

[0127] In some embodiments, the siRNA duplex comprises a guide strand sequence comprising or consisting of a sequence of any one of the guide sequences of Tables 1, 3, 9, 11, 12, 13, 19, 23, 24, and 25, e.g., any one of SEQ ID NOS: 4, 6, 8, 10, 12, 14, 16, 18, 20, 22, 24, 26, 28, 30, 32, 34, 36, 38, 40, 42, 44, 46, 48, 50, 52, 54, 56, 58, 60, 62, 64, 66, 68, 70, 72, 74, 76, 78, 80, 82, 84, 86, 88, 90, 92, 94, 96, 98, 100, 102, 104, 106, 108, 110, 112, 114, 116, 118, 120, 124, 126, 128, 130, 132, 134, 136, 138, 140, 142, 144, 146, 148, 150, 152, 154, 156, 158, 160, 162, 164, 166, 168, 170, 172, 174, 176, 178, 180, 182, 184, 186, 188, 190, 192, 194, 196, 198, 200, 202, 204, 206, 208, 210, 212, 214, 216, 218, 220, 222, 224, 226, 228, 230, 232, 234, 236, 238, 240, 242, 244, 246, 248, 250, 252, 254, 256, 258, 260, 262, 264, 266, 268, 270, 272, 274, 276, 278, 280, 282, 284, 286, 288, 290, 292, 294, 296, 298, 300, 302, 304, 306, 308, 310, 312, 314, 316, 318, 320, 324, 326, 328, 330, 332, 334, 336, 338, 340, 342, 344, 346, 348, 350, 352, 354, 356, 358, 360, 362, 364, 366, 368, 370, 372, 374, 376, 378, 380, 382, 384, 386, 388, 390, 392, 394, 396, 398, 400, 402, 404, 406, 408, 410, 412, 414, 416, 418, 420, 422, 424, 426, 428, 430, 432, 434, 436, 1176-1288, 1811-1827, 2015, 2065, 2083, 2152, 2203, and 2209, wherein 1, 2, 3, or 4 nucleotides at positions 19-22 differ from the selected SEQ ID NO (variant nucleotide(s)), such that the guide strand sequence is no longer complementary to the ATXN2 target sequence at the variant nucleotide(s).

[0128] In some embodiments, the siRNA duplex comprises a guide strand sequence of Table 12. In some embodiments, the siRNA duplex comprises a guide strand sequence comprising or consisting of the nucleic acid sequence set forth in any one of SEQ ID NOS: 12, 14, 40, 60, 100, 104, 108, 112, 124, 126, 128, 166, 198, 220, 242, 302, 306, 308, 330, 336, and 362. In some embodiments, the siRNA duplex comprises a guide strand sequence comprising or consisting of the nucleic acid sequence set forth in any one of SEQ ID NOS: 12, 14, 40, 60, 100, 104, 108, 112, 124, 126, 128, 166, 198, 220, 242, 302, 306, 308, 330, 336, and 362 with at least 1, 2, 3, 4, or 5 mismatches to the target ATXN2 mRNA sequence. In some embodiments, the siRNA duplex comprises a guide strand sequence comprising or consisting of a nucleic acid sequence that is at least 60%, 70%, 75%, 80%, 85%, 90%, 95%, 97%, 99%, or 100% identical to any one of SEQ ID NOS: 12, 14, 40, 60, 100, 104, 108, 112, 124, 126, 128, 166, 198, 220, 242, 302, 306, 308, 330, 336, and 362. In some embodiments, the siRNA duplex comprises a guide strand sequence comprising or consisting of at least 15, 16, 17, 18, 19, 20, 21, or 22 contiguous nucleotides of a sequence of any one of SEQ ID NOS: 12, 14, 40, 60, 100, 104, 108, 112, 124, 126, 128, 166, 198, 220, 242, 302, 306, 308, 330, 336, and 362, preferably wherein the guide strand sequence retains positions 2-7 (“seed sequence”) of the selected SEQ ID NO. In some embodiments, the siRNA duplex comprises a guide strand sequence comprising or consisting of a sequence of any one of SEQ ID NOS: 12, 14, 40, 60, 100, 104, 108, 112, 124, 126, 128, 166, 198, 220, 242, 302, 306, 308, 330, 336, and 362, wherein 1, 2, 3, or 4 nucleotides at positions 19-22 differ from the selected SEQ ID NO (variant nucleotide(s)), such that the guide strand sequence is no longer complementary to the ATXN2 target sequence at the variant nucleotide(s).

[0129] In some embodiments, the siRNA duplex comprises a guide strand sequence of Table 13. In some embodiments, the siRNA duplex comprises a guide strand sequence comprising or consisting of the nucleic acid sequence set forth in any one of SEQ ID NOS: 14, 40, 100, 108, 112, 128, 166, 198, 242, 308, 336, and 362. In some embodiments, the siRNA duplex comprises a guide strand sequence comprising or consisting of the nucleic acid sequence set forth in any one of SEQ ID NOS: 14, 40, 100, 108, 112, 128, 166, 198, 242, 308, 336, and 362 with at least 1, 2, 3, 4, or 5 mismatches to the target ATXN2 mRNA sequence. In some embodiments, the siRNA duplex comprises a guide strand sequence comprising or consisting of a nucleic acid sequence that is at least 60%, 70%, 75%, 80%, 85%, 90%, 95%, 97%, 99%, or 100% identical to any one of SEQ ID NOS: 14, 40, 100, 108, 112, 128, 166, 198, 242, 308, 336, and 362. In some embodiments, the siRNA duplex comprises a guide strand sequence comprising or consisting of at least 15, 16, 17, 18, 19, 20, 21, or 22 contiguous nucleotides of a sequence of any one of SEQ ID NOS: 14, 40, 100, 108, 112, 128, 166, 198, 242, 308, 336, and 362, preferably wherein the guide strand sequence retains positions 2-7 (“seed sequence”) of the selected SEQ ID NO. In some embodiments, the siRNA duplex comprises a guide strand sequence comprising or consisting of a sequence of any one of SEQ ID NOS: 14, 40, 100, 108, 112, 128, 166, 198, 242, 308, 336, and 362, wherein 1, 2, 3, or 4 nucleotides at positions 19-22 differ from the selected SEQ ID NO (variant nucleotide(s)), such that the guide strand sequence is no longer complementary to the ATXN2 target sequence at the variant nucleotide(s).

[0130] In some embodiments, the siRNA duplex comprises a guide strand sequence of Table 19. In some embodiments, the siRNA duplex comprises a guide strand sequence comprising or consisting of the nucleic acid sequence set forth in any one of SEQ ID NOS:1176-1288, 40, 108, and 166. In some embodiments, the siRNA duplex comprises a guide strand sequence comprising or consisting of the nucleic acid sequence set forth in any one of SEQ ID NOS:1176-1288, 40, 108, and 166, with at least 1, 2, 3, 4, or 5 mismatches to the target ATXN2 mRNA sequence. In some embodiments, the siRNA duplex comprises a guide strand sequence comprising or consisting of a nucleic acid sequence that is at least 60%, 70%, 75%, 80%, 85%, 90%, 95%, 97%, 99%, or 100% identical to any one of SEQ ID NOS:1176-1288, 40, 108, and 166. In some embodiments, the siRNA duplex comprises a guide strand sequence comprising or consisting of at least 15, 16, 17, 18, 19, 20, 21, or 22 contiguous nucleotides of a sequence of any one of SEQ ID NOS:1176-1288, 40, 108, and 166, preferably wherein the guide strand sequence retains positions 2-7 (“seed sequence”) of the selected SEQ ID NO. In some embodiments, the siRNA duplex comprises a guide strand sequence comprising or consisting of a sequence of any one of SEQ ID NOS:1176-1288, 40, 108, and 166, wherein 1, 2, 3, or 4 nucleotides at positions 19-22 differ from the selected SEQ ID NO (variant nucleotide(s)), such that the guide strand sequence is no longer complementary to the ATXN2 target sequence at the variant nucleotide(s).

[0131] In some embodiments, the siRNA duplex comprises a guide strand sequence of Table 23. In some embodiments, the siRNA duplex comprises a guide strand sequence comprising or consisting of the nucleic acid sequence set forth in any one of SEQ ID NOS:1908-2007. In some embodiments, the siRNA duplex comprises a guide strand sequence comprising or consisting of the nucleic acid sequence set forth in any one of SEQ ID NOS:1908-2007, with at least 1, 2, 3, 4, or 5 mismatches to the target ATXN2 mRNA sequence. In some embodiments, the siRNA duplex comprises a guide strand sequence comprising or consisting of a nucleic acid sequence that is at least 60%, 70%, 75%, 80%, 85%, 90%, 95%, 97%, 99%, or 100% identical to any one of SEQ ID NOS:1908-2007. In some embodiments, the siRNA duplex comprises a guide strand sequence comprising or consisting of at least 15, 16, 17, 18, 19, 20, 21, or 22 contiguous nucleotides of a sequence of any one of SEQ ID NOS:1908-2007, preferably wherein the guide strand sequence retains positions 2-7 (“seed sequence”) of the selected SEQ ID NO. In some embodiments, the siRNA duplex comprises a guide strand sequence comprising or consisting of a sequence of any one of SEQ ID NOS:1908-2007, wherein 1, 2, 3, or 4 nucleotides at positions 19-22 differ from the selected SEQ ID NO (variant nucleotide(s)), such that the guide strand sequence is no longer complementary to the ATXN2 target sequence at the variant nucleotide(s).

[0132] In some embodiments, the siRNA duplex comprises a guide strand sequence of Table 24. In some embodiments, the siRNA duplex comprises a guide strand sequence comprising or consisting of the nucleic acid sequence set forth in any one of SEQ ID NOS:100, 112, 166, 202, 246, 306, 308, 314, 1180, 1185, 1196, 1200, 1211, 1213, 1215, 1216, 1224, 1811-1822, 1824-1827, 2015, 2065, 2083, 2152, 2203, and 2209. In some embodiments, the siRNA duplex comprises a guide strand sequence comprising or consisting of the nucleic acid sequence set forth in any one of SEQ ID NOS:100, 112, 166, 202, 246, 306, 308, 314, 1180, 1185, 1196, 1200, 1211, 1213, 1215, 1216, 1224, 1811-1822, 1824-1827, 2015, 2065, 2083, 2152, 2203, and 2209, with at least 1, 2, 3, 4, or 5 mismatches to the target ATXN2 mRNA sequence. In some embodiments, the siRNA duplex comprises a guide strand sequence comprising or consisting of a nucleic acid sequence that is at least 60%, 70%, 75%, 80%, 85%, 90%, 95%, 97%, 99%, or 100% identical to any one of SEQ ID NOS:100, 112, 166, 202, 246, 306, 308, 314, 1180, 1185, 1196, 1200, 1211, 1213, 1215, 1216, 1224, 1811-1822, 1824-1827, 2015, 2065, 2083, 2152, 2203, and 2209. In some embodiments, the siRNA duplex comprises a guide strand sequence comprising or consisting of at least 15, 16, 17, 18, 19, 20, 21, or 22 contiguous nucleotides of a sequence of any one of SEQ ID NOS:100, 112, 166, 202, 246, 306, 308, 314, 1180, 1185, 1196, 1200, 1211, 1213, 1215, 1216, 1224, 1811-1822, 1824-1827, 2015, 2065, 2083, 2152, 2203, and 2209, preferably wherein the guide strand sequence retains positions 2-7 (“seed sequence”) of the selected SEQ ID NO. In some embodiments, the siRNA duplex comprises a guide strand sequence comprising or consisting of a sequence of any one of SEQ ID NOS:100, 112, 166, 202, 246, 306, 308, 314, 1180, 1185, 1196, 1200, 1211, 1213, 1215, 1216, 1224, 1811-1822, 1824-1827, 2015, 2065, 2083, 2152, 2203, and 2209, wherein 1, 2, 3, or 4 nucleotides at positions 19-22 differ from the selected SEQ ID NO (variant nucleotide(s)), such that the guide strand sequence is no longer complementary to the ATXN2 target sequence at the variant nucleotide(s).

[0133] In some embodiments, the siRNA duplex comprises a guide strand sequence of Table 25. In some embodiments, the siRNA duplex comprises a guide strand sequence comprising or consisting of the nucleic acid sequence set forth in any one of SEQ ID NOS:1185, 1816, 1213, 1819, 2083, 1215, 1216, 1811, and 314. In some embodiments, the siRNA duplex comprises a guide strand sequence comprising or consisting of the nucleic acid sequence set forth in any one of SEQ ID NOS:1185, 1816, 1213, 1819, 2083, 1215, 1216, 1811, and 314, with at least 1, 2, 3, 4, or 5 mismatches to the target ATXN2 mRNA sequence. In some embodiments, the siRNA duplex comprises a guide strand sequence comprising or consisting of a nucleic acid sequence that is at least 60%, 70%, 75%, 80%, 85%, 90%, 95%, 97%, 99%, or 100% identical to any one of SEQ ID NOS:1185, 1816, 1213, 1819, 2083, 1215, 1216, 1811, and 314. In some embodiments, the siRNA duplex comprises a guide strand sequence comprising or consisting of at least 15, 16, 17, 18, 19, 20, 21, or 22 contiguous nucleotides of a sequence of any one of SEQ ID NOS:1185, 1816, 1213, 1819, 2083, 1215, 1216, 1811, and 314, preferably wherein the guide strand sequence retains positions 2-7 (“seed sequence”) of the selected SEQ ID NO. In some embodiments, the siRNA duplex comprises a guide strand sequence comprising or consisting of a sequence of any one of SEQ ID NOS:1185, 1816, 1213, 1819, 2083, 1215, 1216, 1811, and 314, wherein 1, 2, 3, or 4 nucleotides at positions 19-22 differ from the selected SEQ ID NO (variant nucleotide(s)), such that the guide strand sequence is no longer complementary to the ATXN2 target sequence at the variant nucleotide(s).

[0134] In some embodiments, the siRNA duplex comprises a guide strand sequence comprising or consisting of the nucleic acid sequence set forth in any one of SEQ ID NOS:1185, 1816, 1213, and 1811. In some embodiments, the siRNA duplex comprises a guide strand sequence comprising or consisting of the nucleic acid sequence set forth in any one of SEQ ID NOS:1185, 1816, 1213, and 1811, with at least 1, 2, 3, 4, or 5 mismatches to the target ATXN2 mRNA sequence. In some embodiments, the siRNA duplex comprises a guide strand sequence comprising or consisting of a nucleic acid sequence that is at least 60%, 70%, 75%, 80%, 85%, 90%, 95%, 97%, 99%, or 100% identical to any one of SEQ ID NOS:1185, 1816, 1213, and 1811. In some embodiments, the siRNA duplex comprises a guide strand sequence comprising or consisting of at least 15, 16, 17, 18, 19, 20, 21, or 22 contiguous nucleotides of a sequence of any one of SEQ ID NOS:1185, 1816, 1213, and 1811, preferably wherein the guide strand sequence retains positions 2-7 (“seed sequence”) of the selected SEQ ID NO. In some embodiments, the siRNA duplex comprises a guide strand sequence comprising or consisting of a sequence of any one of SEQ ID NOS:1185, 1816, 1213, and 1811, wherein 1, 2, 3, or 4 nucleotides at positions 19-22 differ from the selected SEQ ID NO (variant nucleotide(s)), such that the guide strand sequence is no longer complementary to the ATXN2 target sequence at the variant nucleotide(s).

[0135] In some embodiments the siRNA duplex comprises a guide strand sequence and passenger strand sequence of any one of siRNA duplexes provided by Tables 1, 19, 23, and 24. In some embodiments, the siRNA duplex comprises a guide strand sequence and passenger strand sequence comprising any one of: SEQ ID NOS:12 and 11; SEQ ID NOS: 14 and 13; SEQ ID NOS: 40 and 39; SEQ ID NOS: 60 and 59; SEQ ID NOS: 100 and 99; SEQ ID NOS: 104 and 103; SEQ ID NOS: 108 and 107; SEQ ID NOS: 112 and 111; SEQ ID NOS: 124 and 123; SEQ ID NOS: 126 and 125; SEQ ID NOS: 128 and 127; SEQ ID NOS: 166 and 165; SEQ ID NOS: 198 and 197; SEQ ID NOS: 220 and 219; SEQ ID NOS: 242 and 241; SEQ ID NOS: 302 and 301; SEQ ID NOS: 306 and 305; SEQ ID NOS: 308 and 307; SEQ ID NOS: 330 and 320; SEQ ID NOS: 336 and 335; and SEQ ID NOS: 362 and 361. In some embodiments, the siRNA duplex comprises a guide strand sequence and passenger strand sequence comprising any one of: SEQ ID NOS: 14 and 13; SEQ ID NOS: 40 and 39; SEQ ID NOS: 100 and 99; SEQ ID NOS: 8 and 107: SEQ ID NOS: 2 and 11; SEQ ID NOS 128 and 127; SEQ ID NOS: 166 and 165; SEQ ID NOS: 198 and 197; SEQ ID NOS: 242 and 241; SEQ ID NOS: 308 and 307; SEQ ID NOS: 336 and 335; and SEQ ID NOS: 362 and 361.

TABLE 1
ATXN2 Specific siRNA Duplex Sequences

| | sense sequence | antisense sequence |
|---|---|---|
| duplex ID | (passenger) | (guide) |
| XD-14738 | CCUCCGCCUCAGACUGUUUUGG | AAAACAGUCUGAGGCGGAGGGA |
| | [SEQ ID NO: 3] | [SEQ ID NO: 4] |
| XD-14739 | CUCCGCCUCAGACUGUUUUAGU | UAAAACAGUCUGAGGCGGAGGG |
| | [SEQ ID NO: 5] | [SEQ ID NO: 6] |
| XD-14740 | CGGCGGCAGCGGCCUUCUAACG | UUAGAAGGCCGCUGCCGCCGGG |
| | [SEQ ID NO: 7] | [SEQ ID NO: 8] |
| XD-14741 | GGACUGCCUCAGUCUACGAUUU | AUCGUAGACUGAGGCAGUCCUU |
| | [SEQ ID NO: 9] | [SEQ ID NO: 10] |
| XD-14742 | CUGCCUCAGUCUACGAUUUAUU | UAAAUCGUAGACUGAGGCAGUC |
| | [SEQ ID NO: 11] | [SEQ ID NO: 12] |
| XD-14743 | UGCCUCAGUCUACGAUUUCUUU | AGAAAUCGUAGACUGAGGCAGU |
| | [SEQ ID NO: 13] | [SEQ ID NO: 14] |
| XD-14744 | CCUCAGUCUACGAUUUCUUUUG | AAAGAAAUCGUAGACUGAGGCA |
| | [SEQ ID NO: 15] | [SEQ ID NO: 16] |
| XD-14745 | CAGUCUACGAUUUCUUUUGAUG | UCAAAAGAAAUCGUAGACUGAG |
| | [SEQ ID NO: 17] | [SEQ ID NO: 18] |
| XD-14746 | GAGGAUGGUUCAUAUACUUACA | UAAGUAUAUGAACCAUCCUCAU |
| | [SEQ ID NO: 19] | [SEQ ID NO: 20] |
| XD-14747 | AGGAUGGUUCAUAUACUUAAAU | UUAAGUAUAUGAACCAUCCUCA |
| | [SEQ ID NO: 21] | [SEQ ID NO: 22] |
| XD-14748 | GGAUGGUUCAUAUACUUACAUC | UGUAAGUAUAUGAACCAUCCUC |
| | [SEQ ID NO: 23] | [SEQ ID NO: 24] |
| XD-14749 | UUCAUAUACUUACAUCAGUUGU | AACUGAUGUAAGUAUAUGAACC |
| | [SEQ ID NO: 25] | [SEQ ID NO: 26] |
| XD-14750 | AUGAGAAAAGUACAGAAUCAAG | UGAUUCUGUACUUUUCUCAUGU |
| | [SEQ ID NO: 27] | [SEQ ID NO: 28] |
| XD-14751 | GAGAAAAGUACAGAAUCCAAUU | UUGGAUUCUGUACUUUUCUCAU |
| | [SEQ ID NO: 29] | [SEQ ID NO: 30] |
| XD-14752 | AAAGUACAGAAUCCAGUUCAGG | UGAACUGGAUUCUGUACUUUUC |
| | [SEQ ID NO: 31] | [SEQ ID NO: 32] |
| XD-14753 | AAGUACAGAAUCCAGUUCGAGG | UCGAACUGGAUUCUGUACUUUU |
| | [SEQ ID NO: 33] | [SEQ ID NO: 34] |
| XD-14754 | GUACAGAAUCCAGUUCGGGACC | UCCCGAACUGGAUUCUGUACUU |
| | [SEQ ID NO: 35] | [SEQ ID NO: 36] |
| XD-14755 | UACAGAAUCCAGUUCGGGGACG | UCCCCGAACUGGAUUCUGUACU |
| | [SEQ ID NO: 37] | [SEQ ID NO: 38] |
| XD-14756 | UCAGACUUUGUUGUGGUACAGU | UGUACCACAACAAAGUCUGAAC |
| | [SEQ ID NO: 39] | [SEQ ID NO: 40] |
| XD-14757 | UUUGUUGUGGUACAGUUUAAAG | UUAAACUGUACCACAACAAAGU |
| | [SEQ ID NO: 41] | [SEQ ID NO: 42] |
| XD-14758 | UUGUUGUGGUACAGUUUAAAGA | UUUAAACUGUACCACAACAAAG |
| | [SEQ ID NO: 43] | [SEQ ID NO: 44] |
| XD-14759 | UGUGGUACAGUUUAAAGAUAUG | UAUCUUUAAACUGUACCACAAC |
| | [SEQ ID NO: 45] | [SEQ ID NO: 46] |
| XD-14760 | UUACUGACUCUGCUAUCAGUGC | ACUGAUAGCAGAGUCAGUAAAA |
| | [SEQ ID NO: 47] | [SEQ ID NO: 48] |
| XD-14761 | CUGACUCUGCUAUCAGUGCUAA | AGCACUGAUAGCAGAGUCAGUA |
| | [SEQ ID NO: 49] | [SEQ ID NO: 50] |
| XD-14762 | UGACUCUGCUAUCAGUGCUAAA | UAGCACUGAUAGCAGAGUCAGU |
| | [SEQ ID NO: 51] | [SEQ ID NO: 52] |
| XD-14763 | CUAAAGUGAAUGGCGAACAAAA | UUGUUCGCCAUUCACUUUAGCA |
| | [SEQ ID NO: 53] | [SEQ ID NO: 54] |
| XD-14764 | AAAGUGAAUGGCGAACACAAAG | UUGUGUUCGCCAUUCACUUUAG |
| | [SEQ ID NO: 55] | [SEQ ID NO: 56] |
| XD-14765 | GUGAAUGGCGAACACAAAGAGA | UCUUUGUGUUCGCCAUUCACUU |
| | [SEQ ID NO: 57] | [SEQ ID NO: 58] |
| XD-14766 | CUUUGGAAAAUGACGUAUCUAA | AGAUACGUCAUUUUCCAAAGCC |
| | [SEQ ID NO: 59] | [SEQ ID NO: 60] |
| XD-14767 | UUGGAAAAUGACGUAUCUAAUG | UUAGAUACGUCAUUUUCCAAAG |
| | [SEQ ID NO: 61] | [SEQ ID NO: 62] |
| XD-14768 | GGAAAAUGACGUAUCUAAUAGA | UAUUAGAUACGUCAUUUUCCAA |
| | [SEQ ID NO: 63] | [SEQ ID NO: 64] |
| XD-14769 | AAAUGACGUAUCUAAUGGAUGG | AUCCAUUAGAUACGUCAUUUUC |
| | [SEQ ID NO: 65] | [SEQ ID NO: 66] |
| XD-14770 | AUGACGUAUCUAAUGGAUGAGA | UCAUCCAUUAGAUACGUCAUUU |
| | [SEQ ID NO: 67] | [SEQ ID NO: 68] |
| XD-14771 | UAAUGGAUGGGAUCCCAAUAAU | UAUUGGGAUCCCAUCCAUUAGA |
| | [SEQ ID NO: 69] | [SEQ ID NO: 70] |
| XD-14772 | AAUGGAUGGGAUCCCAAUGAUA | UCAUUGGGAUCCCAUCCAUUAG |
| | [SEQ ID NO: 71] | [SEQ ID NO: 72] |
| XD-14773 | AUAUGUUUCGAUAUAAUGAAGA | UUCAUUAUAUCGAAACAUAUCA |
| | [SEQ ID NO: 73] | [SEQ ID NO: 74] |
| XD-14774 | AUGUUUCGAUAUAAUGAAGAAA | UCUUCAUUAUAUCGAAACAUAU |
| | [SEQ ID NO: 75] | [SEQ ID NO: 76] |
| XD-14775 | GUCUACGUAUGAUAGCAGUUUA | AACUGCUAUCAUACGUAGACAC |
| | [SEQ ID NO: 77] | [SEQ ID NO: 78] |
| XD-14776 | CGUAUACAGUGCCCUUAGAAAG | UUCUAAGGGCACUGUAUACGAA |
| | [SEQ ID NO: 79] | [SEQ ID NO: 80] |
| XD-14777 | UAUACAGUGCCCUUAGAAAAAG | UUUUCUAAGGGCACUGUAUACG |
| | [SEQ ID NO: 81] | [SEQ ID NO: 82] |
| XD-14778 | CAAGGGCAAACCAGUUAGCAGA | UGCUAACUGGUUUGCCCUUGCU |
| | [SEQ ID NO: 83] | [SEQ ID NO: 84] |
| XD-14779 | AGGGCAAACCAGUUAGCAGAAG | UCUGCUAACUGGUUUGCCCUUG |
| | [SEQ ID NO: 85] | [SEQ ID NO: 86] |
| XD-14780 | UGAGUCAAGUGCCCAGUACAAA | UGUACUGGGCACUUGACUCAAU |
| | [SEQ ID NO: 87] | [SEQ ID NO: 88] |
| XD-14781 | GAGUCAAGUGCCCAGUACAAAG | UUGUACUGGGCACUUGACUCAA |
| | [SEO ID NO: 89] | [SEO ID NO: 90] |
| XD-14782 | GCCCAGUACAAAGCUCGAGUGG | ACUCGAGCUUUGUACUGGGCAC |
| | [SEQ ID NO: 91] | [SEQ ID NO: 92] |
| XD-14783 | AAGAAAAAUACACAGCAGUUCA | AACUGCUGUGUAUUUUUCUUCC |
| | [SEQ ID NO: 93] | [SEQ ID NO: 94] |
| XD-14784 | GAGGGGCACAGCAUAAACAAUA | UUGUUUAUGCUGUGCCCCUCAC |
| | [SEQ ID NO: 95] | [SEQ ID NO: 96] |
| XD-14785 | AGUCAUAUCCUGGGGAAGUAGG | UACUUCCCCAGGAUAUGACUUC |
| | [SEQ ID NO: 97] | [SEQ ID NO: 98] |
| XD-14786 | GAGACAGAAUUCACCGCGUAUG | UACGCGGUGAAUUCUGUCUCCC |
| | [SEQ ID NO: 99] | [SEQ ID NO: 100] |
| XD-14787 | AGACAGAAUUCACCGCGUAUGG | AUACGCGGUGAAUUCUGUCUCC |
| | [SEQ ID NO: 101] | [SEQ ID NO: 102] |
| XD-14788 | GACAGAAUUCACCGCGUAUAGG | UAUACGCGGUGAAUUCUGUCUC |
| | [SEQ ID NO: 103] | [SEQ ID NO: 104] |
| XD-14789 | ACAGAAUUCACCGCGUAUGAGC | UCAUACGCGGUGAAUUCUGUCU |
| | [SEQ ID NO: 105] | [SEQ ID NO: 106] |
| XD-14790 | ACUUCAGAUUUCAACCCGAAUU | UUCGGGUUGAAAUCUGAAGUGU |
| | [SEQ ID NO: 107] | [SEQ ID NO: 108] |
| XD-14791 | UCAGACCAAAGAGUAGUUAAUG | UUAACUACUCUUUGGUCUGAAC |
| | [SEQ ID NO: 109] | [SEQ ID NO: 110] |
| XD-14792 | CAGACCAAAGAGUAGUUAAUGG | AUUAACUACUCUUUGGUCUGAA |
| | [SEQ ID NO: 111] | [SEQ ID NO: 112] |
| XD-14793 | AGACCAAAGAGUAGUUAAUAGA | UAUUAACUACUCUUUGGUCUGA |
| | [SEQ ID NO: 113] | [SEQ ID NO: 114] |
| XD-14794 | GACCAAAGAGUAGUUAAUGAAG | UCAUUAACUACUCUUUGGUCUG |
| | [SEQ ID NO: 115] | [SEQ ID NO: 116] |
| XD-14795 | CCAAAGAGUAGUUAAUGGAAGU | UUCCAUUAACUACUCUUUGGUC |
| | [SEQ ID NO: 117] | [SEQ ID NO: 118] |
| XD-14796 | UGUCCCCAAAGGCCCAGCGACA | UCGCUGGGCCUUUGGGGACAUC |
| | [SEQ ID NO: 119] | [SEQ ID NO: 120] |
| XD-14797 | GCCCAGCGACAUCCUCGAAAUC | UUUCGAGGAUGUCGCUGGGCCU |
| | [SEQ ID NO: 121] | [SEQ ID NO: 122] |
| XD-14798 | CCCAGCGACAUCCUCGAAAUCA | AUUUCGAGGAUGUCGCUGGGCC |
| | [SEQ ID NO: 123] | [SEQ ID NO: 124] |
| XD-14799 | CCAGCGACAUCCUCGAAAUAAC | UAUUUCGAGGAUGUCGCUGGGC |
| | [SEQ ID NO: 125] | [SEQ ID NO: 126] |
| XD-14800 | AGCGACAUCCUCGAAAUCAAAG | UUGAUUUCGAGGAUGUCGCUGG |
| | [SEQ ID NO: 127] | [SEQ ID NO: 128] |
| XD-14801 | GCGACAUCCUCGAAAUCACAGA | UGUGAUUUCGAGGAUGUCGCUG |
| | [SEQ ID NO: 129] | [SEQ ID NO: 130] |
| XD-14802 | UGCUGGGAGGGGUUCCAUAUCC | AUAUGGAACCCCUCCCAGCAGA |
| | [SEQ ID NO: 131] | [SEQ ID NO: 132] |
| XD-14803 | GCUACUCCUCCAGUAGCAAAGA | UUUGCUACUGGAGGAGUAGCUG |
| | [SEQ ID NO: 133] | [SEQ ID NO: 134] |
| XD-14804 | CCUCCAGUAGCAAGGACCAAUC | UUGGUCCUUGCUACUGGAGGAG |
| | [SEQ ID NO: 135] | [SEQ ID NO: 136] |
| XD-14805 | GUGGUCAGUGGGGUUCCAAAAU | UUUGGAACCCCACUGACCACUG |
| | [SEQ ID NO: 137] | [SEQ ID NO: 138] |
| XD-14806 | GUGGGGUUCCAAGAUUAUCACC | UGAUAAUCUUGGAACCCCACUG |
| | [SEQ ID NO: 139] | [SEQ ID NO: 140] |
| XD-14807 | UCCAAGAUUAUCCCCUAAAACU | UUUUAGGGGAUAAUCUUGGAAC |
| | [SEQ ID NO: 141] | [SEQ ID NO: 142] |
| XD-14808 | CCAAGAUUAUCCCCUAAAAAUC | UUUUUAGGGGAUAAUCUUGGAA |
| | [SEQ ID NO: 143] | [SEQ ID NO: 144] |
| XD-14809 | CAAGAUUAUCCCCUAAAACUCA | AGUUUUAGGGGAUAAUCUUGGA |
| | [SEQ ID NO: 145] | [SEQ ID NO: 146] |
| XD-14810 | AAGAUUAUCCCCUAAAACUAAU | UAGUUUUAGGGGAUAAUCUUGG |
| | [SEQ ID NO: 147] | [SEQ ID NO: 148] |
| XD-14811 | AGAUUAUCCCCUAAAACUCAUA | UGAGUUUUAGGGGAUAAUCUUG |
| | [SEQ ID NO: 149] | [SEQ ID NO: 150] |
| XD-14812 | GAUUAUCCCCUAAAACUCAUAG | AUGAGUUUUAGGGGAUAAUCUU |
| | [SEQ ID NO: 151] | [SEQ ID NO: 152] |
| XD-14813 | AUUAUCCCCUAAAACUCAUAGA | UAUGAGUUUUAGGGGAUAAUCU |
| | [SEQ ID NO: 153] | [SEQ ID NO: 154] |
| XD-14814 | UAUCCCCUAAAACUCAUAGACC | UCUAUGAGUUUUAGGGGAUAAU |
| | [SEQ ID NO: 155] | [SEQ ID NO: 156] |
| XD-14815 | AACUCAUAGACCCAGGUCUACC | UAGACCUGGGUCUAUGAGUUUU |
| | [SEQ ID NO: 157] | [SEQ ID NO: 158] |
| XD-14816 | UCCCCAAGCUGGUAUUAUUACA | UAAUAAUACCAGCUUGGGGAGA |
| | [SEQ ID NO: 159] | [SEQ ID NO: 160] |
| XD-14817 | CCCCAAGCUGGUAUUAUUCAAA | UGAAUAAUACCAGCUUGGGGAG |
| | [SEQ ID NO: 161] | [SEQ ID NO: 162] |
| XD-14818 | CAUCUCCUACGCCUGCUAGUCC | ACUAGCAGGCGUAGGAGAUGCA |
| | [SEQ ID NO: 163] | [SEQ ID NO: 164] |
| XD-14819 | CCUGCUAGUCCUGCAUCGAACA | UUCGAUGCAGGACUAGCAGGCG |
| | [SEQ ID NO: 165] | [SEQ ID NO: 166] |
| XD-14820 | UGCUAGUCCUGCAUCGAACAGA | UGUUCGAUGCAGGACUAGCAGG |
| | [SEQ ID NO: 167] | [SEQ ID NO: 168] |
| XD-14821 | CUGCAUCGAACAGAGCUGUUAC | AACAGCUCUGUUCGAUGCAGGA |
| | [SEQ ID NO: 169] | [SEQ ID NO: 170] |
| XD-14822 | GCAUCGAACAGAGCUGUUAACC | UUAACAGCUCUGUUCGAUGCAG |
| | [SEQ ID NO: 171] | [SEQ ID NO: 172] |
| XD-14823 | ACCCCUUCUAGUGAGGCUAAAG | UUAGCCUCACUAGAAGGGGUAA |
| | [SEQ ID NO: 173] | [SEQ ID NO: 174] |
| XD-14824 | CCCCUUCUAGUGAGGCUAAAGA | UUUAGCCUCACUAGAAGGGGUA |
| | [SEQ ID NO: 175] | [SEQ ID NO: 176] |
| XD-14825 | CCUUCUAGUGAGGCUAAAGAUU | UCUUUAGCCUCACUAGAAGGGG |
| | [SEQ ID NO: 177] | [SEQ ID NO: 178] |
| XD-14826 | UUCUAGUGAGGCUAAAGAUUCC | AAUCUUUAGCCUCACUAGAAGG |
| | [SEQ ID NO: 179] | [SEQ ID NO: 180] |
| XD-14827 | AAUGAAACAUCACCUAGCUUCU | AAGCUAGGUGAUGUUUCAUUGG |
| | [SEQ ID NO: 181] | [SEQ ID NO: 182] |
| XD-14828 | ACAUCACCUAGCUUCUCAAAAG | UUUGAGAAGCUAGGUGAUGUUU |
| | [SEQ ID NO: 183] | [SEQ ID NO: 184] |
| XD-14829 | AUCACCUAGCUUCUCAAAAACU | UUUUUGAGAAGCUAGGUGAUGU |
| | [SEQ ID NO: 185] | [SEQ ID NO: 186] |
| XD-14830 | CCUAGCUUCUCAAAAGCUGAAA | UCAGCUUUUGAGAAGCUAGGUG |
| | [SEQ ID NO: 187] | [SEQ ID NO: 188] |
| XD-14831 | AAAACAAAGGUAUAUCACCAGU | UGGUGAUAUACCUUUGUUUUCA |
| | [SEQ ID NO: 189] | [SEQ ID NO: 190] |
| XD-14832 | UAAGAAUGAUUUUAGGUUAAAG | UUAACCUAAAAUCAUUCUUAAA |
| | [SEQ ID NO: 191] | [SEQ ID NO: 192] |
| XD-14833 | AAGAAUGAUUUUAGGUUACAGC | UGUAACCUAAAAUCAUUCUUAA |
| | [SEQ ID NO: 193] | [SEQ ID NO: 194] |
| XD-14834 | ACUUCUGAAUCUAUGGAUCAAC | UGAUCCAUAGAUUCAGAAGUAG |
| | [SEQ ID NO: 195] | [SEQ ID NO: 196] |
| XD-14835 | UGAAUCUAUGGAUCAACUAAUA | UUAGUUGAUCCAUAGAUUCAGA |
| | [SEQ ID NO: 197] | [SEQ ID NO: 198] |
| XD-14836 | AUCUAUGGAUCAACUACUAAAC | UUAGUAGUUGAUCCAUAGAUUC |
| | [SEQ ID NO: 199] | [SEQ ID NO: 200] |
| XD-14837 | UCUAUGGAUCAACUACUAAACA | UUUAGUAGUUGAUCCAUAGAUU |
| | [SEQ ID NO: 201] | [SEQ ID NO: 202] |
| XD-14838 | UAUGGAUCAACUACUAAACAAA | UGUUUAGUAGUUGAUCCAUAGA |
| | [SEQ ID NO: 203] | [SEQ ID NO: 204] |
| XD-14839 | AUGGAUCAACUACUAAACAAAA | UUGUUUAGUAGUUGAUCCAUAG |
| | [SEQ ID NO: 205] | [SEQ ID NO: 206] |
| XD-14840 | UGGAUCAACUACUAAACAAAAA | UUUGUUUAGUAGUUGAUCCAUA |
| | [SEQ ID NO: 207] | [SEQ ID NO: 208] |
| XD-14841 | GGAUCAACUACUAAACAAAAAU | UUUUGUUUAGUAGUUGAUCCAU |
| | [SEQ ID NO: 209] | [SEQ ID NO: 210] |
| XD-14842 | GCCGAAUAGCCCCAGCAUUUCC | AAAUGCUGGGGCUAUUCGGCUU |
| | [SEQ ID NO: 211] | [SEQ ID NO: 212] |
| XD-14843 | CAGCAUUUCCCCUUCAAUAAUU | UUAUUGAAGGGGAAAUGCUGGG |
| | [SEQ ID NO: 213] | [SEQ ID NO: 214] |
| XD-14844 | UUUCCCCUUCAAUACUUAGUAA | ACUAAGUAUUGAAGGGGAAAUG |
| | [SEQ ID NO: 215] | [SEQ ID NO: 216] |
| XD-14845 | UUCCCCUUCAAUACUUAGUAAC | UACUAAGUAUUGAAGGGGAAAU |
| | [SEQ ID NO: 217] | [SEQ ID NO: 218] |
| XD-14846 | UCCCCUUCAAUACUUAGUAACA | UUACUAAGUAUUGAAGGGGAAA |
| | [SEQ ID NO: 219] | [SEQ ID NO: 220] |
| XD-14847 | CCCCUUCAAUACUUAGUAAAAC | UUUACUAAGUAUUGAAGGGGAA |
| | [SEQ ID NO: 221] | [SEQ ID NO: 222] |
| XD-14848 | UUCAAUACUUAGUAACACGAAG | UCGUGUUACUAAGUAUUGAAGG |
| | [SEQ ID NO: 223] | [SEQ ID NO: 224] |
| XD-14849 | UCAAUACUUAGUAACACGGAGC | UCCGUGUUACUAAGUAUUGAAG |
| | [SEQ ID NO: 225] | [SEQ ID NO: 226] |
| XD-14850 | AUACUUAGUAACACGGAGCACA | UGCUCCGUGUUACUAAGUAUUG |
| | [SEQ ID NO: 227] | [SEQ ID NO: 228] |
| XD-14851 | GUCACUUCCCAAGGGGUUCAGA | UGAACCCCUUGGGAAGUGACCU |
| | [SEQ ID NO: 229] | [SEQ ID NO: 230] |
| XD-14852 | CCAAGGGGUUCAGACUUCCAGC | UGGAAGUCUGAACCCCUUGGGA |
| | [SEQ ID NO: 231] | [SEQ ID NO: 232] |
| XD-14853 | GACGCAGCUGAGCAAGUUAAGA | UUAACUUGCUCAGCUGCGUCUU |
| | [SEQ ID NO: 233] | [SEQ ID NO: 234] |
| XD-14854 | CUGAGCAAGUUAGGAAAUCAAC | UGAUUUCCUAACUUGCUCAGCU |
| | [SEQ ID NO: 235] | [SEQ ID NO: 236] |
| XD-14855 | GAGCAAGUUAGGAAAUCAAAAU | UUUGAUUUCCUAACUUGCUCAG |
| | [SEQ ID NO: 237] | [SEQ ID NO: 238] |
| XD-14856 | CCAAUGCAAAGGAGUUCAAACC | UUUGAACUCCUUUGCAUUGGGA |
| | [SEQ ID NO: 239] | [SEQ ID NO: 240] |
| XD-14857 | GGAGUUCAACCCACGUUCCUUC | AGGAACGUGGGUUGAACUCCUU |
| | [SEQ ID NO: 241] | [SEQ ID NO: 242] |
| XD-14858 | UCUCAGCCAAAGCCUUCUAAUA | UUAGAAGGCUUUGGCUGAGAGA |
| | [SEQ ID NO: 243] | [SEQ ID NO: 244] |
| XD-14859 | CAGCCAAAGCCUUCUACUAACC | UUAGUAGAAGGCUUUGGCUGAG |
| | [SEQ ID NO: 245] | [SEQ ID NO: 246] |
| XD-14860 | AGCCAAAGCCUUCUACUACACC | UGUAGUAGAAGGCUUUGGCUGA |
| | [SEQ ID NO: 247] | [SEQ ID NO: 248] |
| XD-14861 | GCCAAAGCCUUCUACUACCACA | UGGUAGUAGAAGGCUUUGGCUG |
| | [SEQ ID NO: 249] | [SEQ ID NO: 250] |
| XD-14862 | ACCCCAACUUCACCUCGGCAUC | UGCCGAGGUGAAGUUGGGGUAG |
| | [SEQ ID NO: 251] | [SEQ ID NO: 252] |
| XD-14863 | CCCCAACUUCACCUCGGCCUCA | AGGCCGAGGUGAAGUUGGGGUA |
| | [SEQ ID NO: 253] | [SEQ ID NO: 254] |
| XD-14864 | CCCAACUUCACCUCGGCCUAAA | UAGGCCGAGGUGAAGUUGGGGU |
| | [SEQ ID NO: 255] | [SEQ ID NO: 256] |
| XD-14865 | ACUUCACCUCGGCCUCAAGAAC | UCUUGAGGCCGAGGUGAAGUUG |
| | [SEQ ID NO: 257] | [SEQ ID NO: 258] |
| XD-14866 | ACCUCGGCCUCAAGCACAAACU | UUUGUGCUUGAGGCCGAGGUGA |
| | [SEQ ID NO: 259] | [SEQ ID NO: 260] |
| XD-14867 | CCUCGGCCUCAAGCACAACAUA | UGUUGUGCUUGAGGCCGAGGUG |
| | [SEQ ID NO: 261] | [SEQ ID NO: 262] |
| XD-14868 | AGCACAACCUAGCCCAUCUAUG | UAGAUGGGCUAGGUUGUGCUUG |
| | [SEQ ID NO: 263] | [SEQ ID NO: 264] |
| XD-14869 | GCACAACCUAGCCCAUCUAUGG | AUAGAUGGGCUAGGUUGUGCUU |
| | [SEQ ID NO: 265] | [SEQ ID NO: 266] |
| XD-14870 | ACAACCUAGCCCAUCUAUGAUG | UCAUAGAUGGGCUAGGUUGUGC |
| | [SEQ ID NO: 267] | [SEQ ID NO: 268] |
| XD-14871 | CAACCUAGCCCAUCUAUGGUGG | ACCAUAGAUGGGCUAGGUUGUG |
| | [SEQ ID NO: 269] | [SEQ ID NO: 270] |
| XD-14872 | GCCCAUCUAUGGUGGGUCAUCA | AUGACCCACCAUAGAUGGGCUA |
| | [SEQ ID NO: 271] | [SEQ ID NO: 272] |
| XD-14873 | CCCAUCUAUGGUGGGUCAUAAA | UAUGACCCACCAUAGAUGGGCU |
| | [SEQ ID NO: 273] | [SEQ ID NO: 274] |
| XD-14874 | CCAUCUAUGGUGGGUCAUCAAC | UGAUGACCCACCAUAGAUGGGC |
| | [SEQ ID NO: 275] | [SEQ ID NO: 276] |
| XD-14875 | CAUCUAUGGUGGGUCAUCAACA | UUGAUGACCCACCAUAGAUGGG |
| | [SEQ ID NO: 277] | [SEQ ID NO: 278] |
| XD-14876 | GCCAACUCCAGUUUAUACUAAG | UAGUAUAAACUGGAGUUGGCUG |
| | [SEQ ID NO: 279] | [SEQ ID NO: 280] |
| XD-14877 | CACCAAAUAUGAUGUAUCCAGU | UGGAUACAUCAUAUUUGGUGCA |
| | [SEQ ID NO: 281] | [SEQ ID NO: 282] |
| XD-14878 | AGCCCAGGCGUGCAACCUUUAU | AAAGGUUGCACGCCUGGGCUCA |
| | [SEQ ID NO: 283] | [SEQ ID NO: 284] |
| XD-14879 | UACCCAAUACCUAUGACGCACA | UGCGUCAUAGGUAUUGGGUAUA |
| | [SEQ ID NO: 285] | [SEQ ID NO: 286] |
| XD-14880 | CAAUACCUAUGACGCCCAUACC | UAUGGGCGUCAUAGGUAUUGGG |
| | [SEQ ID NO: 287] | [SEQ ID NO: 288] |
| XD-14881 | AUACCUAUGACGCCCAUGCAAG | UGCAUGGGCGUCAUAGGUAUUG |
| | [SEQ ID NO: 289] | [SEQ ID NO: 290] |
| XD-14882 | GAAUCAAGCCAAGACAUAUAGA | UAUAUGUCUUGGCUUGAUUCAC |
| | [SEQ ID NO: 291] | [SEQ ID NO: 292] |
| XD-14883 | AAUCAAGCCAAGACAUAUAAAG | UUAUAUGUCUUGGCUUGAUUCA |
| | [SEQ ID NO: 293] | [SEQ ID NO: 294] |
| XD-14884 | AUCAAGCCAAGACAUAUAGAGC | UCUAUAUGUCUUGGCUUGAUUC |
| | [SEQ ID NO: 295] | [SEQ ID NO: 296] |
| XD-14885 | AAGCCAAGACAUAUAGAGCAGU | UGCUCUAUAUGUCUUGGCUUGA |
| | [SEQ ID NO: 297] | [SEQ ID NO: 298] |
| XD-14886 | CCAAAUAUGCCCCAACAGCAGC | UGCUGUUGGGGCAUAUUUGGUA |
| | [SEQ ID NO: 299] | [SEQ ID NO: 300] |
| XD-14887 | CAAAUAUGCCCCAACAGCGACA | UCGCUGUUGGGGCAUAUUUGGU |
| | [SEQ ID NO: 301] | [SEQ ID NO: 302] |
| XD-14888 | GCAGCGGGCCCACCGAUUGAAG | UCAAUCGGUGGGCCCGCUGCUG |
| | [SEQ ID NO: 303] | [SEQ ID NO: 304] |
| XD-14889 | ACCAGCUUACUCCACGCAAUAU | AUUGCGUGGAGUAAGCUGGUGG |
| | [SEQ ID NO: 305] | [SEQ ID NO: 306] |
| XD-14890 | CCAGCUUACUCCACGCAAUAUG | UAUUGCGUGGAGUAAGCUGGUG |
| | [SEQ ID NO: 307] | [SEQ ID NO: 308] |
| XD-14891 | AGCUUACUCCACGCAAUAUAUU | UAUAUUGCGUGGAGUAAGCUGG |
| | [SEQ ID NO: 309] | [SEQ ID NO: 310] |
| XD-14892 | UCCACGCAAUAUGUUGCCUACA | UAGGCAACAUAUUGCGUGGAGU |
| | [SEQ ID NO: 311] | [SEQ ID NO: 312] |
| XD-14893 | AGUCUCAGCAUCCUCAUGUAUA | UACAUGAGGAUGCUGAGACUGA |
| | [SEQ ID NO: 313] | [SEQ ID NO: 314] |
| XD-14894 | CAGCAUCCUCAUGUCUAUAAUC | UUAUAGACAUGAGGAUGCUGAG |
| | [SEQ ID NO: 315] | [SEQ ID NO: 316] |
| XD-14895 | GUCCUGUAAUACAGGGUAAUGC | AUUACCCUGUAUUACAGGACUA |
| | [SEQ ID NO: 317] | [SEQ ID NO: 318] |
| XD-14896 | ACAGGGUAAUGCUAGAAUGAUG | UCAUUCUAGCAUUACCCUGUAU |
| | [SEQ ID NO: 319] | [SEQ ID NO: 320] |
| XD-14897 | ACUCAGUACGGGGCUCAUGAGC | UCAUGAGCCCCGUACUGAGUUG |
| | [SEQ ID NO: 321] | [SEQ ID NO: 322] |
| XD-14898 | GAGCAGACGCAUGCGAUGUAUG | UACAUCGCAUGCGUCUGCUCAU |
| | [SEQ ID NO: 323] | [SEQ ID NO: 324] |
| XD-14899 | AGCAGACGCAUGCGAUGUAUGC | AUACAUCGCAUGCGUCUGCUCA |
| | [SEQ ID NO: 325] | [SEQ ID NO: 326] |
| XD-14900 | GCAGACGCAUGCGAUGUAUACA | UAUACAUCGCAUGCGUCUGCUC |
| | [SEQ ID NO: 327] | [SEQ ID NO: 328] |
| XD-14901 | CUUGCUCAGCAGUAUGCGCACC | UGCGCAUACUGCUGAGCAAGGG |
| | [SEQ ID NO: 329] | [SEQ ID NO: 330] |
| XD-14902 | CAGCAGUAUGCGCACCCUAACG | UUAGGGUGCGCAUACUGCUGAG |
| | [SEQ ID NO: 331] | [SEQ ID NO: 332] |
| XD-14903 | CAGUAUGCGCACCCUAACGAUA | UCGUUAGGGUGCGCAUACUGCU |
| | [SEQ ID NO: 333] | [SEQ ID NO: 334] |
| XD-14904 | AGUAUGCGCACCCUAACGCUAC | AGCGUUAGGGUGCGCAUACUGC |
| | [SEQ ID NO: 335] | [SEQ ID NO: 336] |
| XD-14905 | GUAUGCGCACCCUAACGCUACC | UAGCGUUAGGGUGCGCAUACUG |
| | [SEQ ID NO: 337] | [SEQ ID NO: 338] |
| XD-14906 | CAGCAGUCAGCCAUUUACCACG | UGGUAAAUGGCUGACUGCUGCU |
| | [SEQ ID NO: 339] | [SEQ ID NO: 340] |
| XD-14907 | AGCCAUUUACCACGCGGGGAUU | UCCCCGCGUGGUAAAUGGCUGA |
| | [SEQ ID NO: 341] | [SEQ ID NO: 342] |
| XD-14908 | UCCAACACGCAGUCGCCACAGA | UGUGGCGACUGCGUGUUGGAGG |
| | [SEQ ID NO: 343] | [SEQ ID NO: 344] |
| XD-14909 | AACACGCAGUCGCCACAGAAUA | UUCUGUGGCGACUGCGUGUUGG |
| | [SEQ ID NO: 345] | [SEQ ID NO: 346] |
| XD-14910 | ACGCAGUCGCCACAGAAUAAUU | UUAUUCUGUGGCGACUGCGUGU |
| | [SEQ ID NO: 347] | [SEQ ID NO: 348] |
| XD-14911 | GCAGUCGCCACAGAAUAGUUUC | AACUAUUCUGUGGCGACUGCGU |
| | [SEQ ID NO: 349] | [SEQ ID NO: 350] |
| XD-14912 | ACAGAAUAGUUUCCCAGCAACA | UUGCUGGGAAACUAUUCUGUGG |
| | [SEQ ID NO: 351] | [SEQ ID NO: 352] |
| XD-14913 | AGUUUCCCAGCAGCACAACAGA | UGUUGUGCUGCUGGGAAACUAU |
| | [SEQ ID NO: 353] | [SEQ ID NO: 354] |
| XD-14914 | ACGAUCCAUCCUUCUCACGUUC | ACGUGAGAAGGAUGGAUCGUAA |
| | [SEQ ID NO: 355] | [SEQ ID NO: 356] |
| XD-14915 | CUCACGUUCAGCCGGCGUAUAC | AUACGCCGGCUGAACGUGAGAA |
| | [SEQ ID NO: 357] | [SEQ ID NO: 358] |
| XD-14916 | UCACGUUCAGCCGGCGUAUACC | UAUACGCCGGCUGAACGUGAGA |
| | [SEQ ID NO: 359] | [SEQ ID NO: 360] |
| XD-14917 | ACGUUCAGCCGGCGUAUACAAA | UGUAUACGCCGGCUGAACGUGA |
| | [SEQ ID NO: 361] | [SEQ ID NO: 362] |
| XD-14918 | CGUUCAGCCGGCGUAUACCAAC | UGGUAUACGCCGGCUGAACGUG |
| | [SEQ ID NO: 363] | [SEQ ID NO: 364] |
| XD-14919 | CCCACAUGGCCCACGUACCUCA | AGGUACGUGGGCCAUGUGGGGU |
| | [SEQ ID NO: 365] | [SEQ ID NO: 366] |
| XD-14920 | CCACAUGGCCCACGUACCUAAG | UAGGUACGUGGGCCAUGUGGGG |
| | [SEQ ID NO: 367] | [SEQ ID NO: 368] |
| XD-14921 | ACAUGGCCCACGUACCUCAAGC | UUGAGGUACGUGGGCCAUGUGG |
| | [SEQ ID NO: 369] | [SEQ ID NO: 370] |
| XD-14922 | CCAACAGCAGUUGUAAGGCUGC | AGCCUUACAACUGCUGUUGGUG |
| | [SEQ ID NO: 371] | [SEQ ID NO: 372] |
| XD-14923 | UCUUGUAACAUCCAAUAGGAAU | UCCUAUUGGAUGUUACAAGAAA |
| | [SEQ ID NO: 373] | [SEQ ID NO: 374] |
| XD-14924 | GACCGAGUAGAGGCAUUUAAGA | UUAAAUGCCUCUACUCGGUCCA |
| | [SEQ ID NO: 375] | [SEQ ID NO: 376] |
| XD-14925 | CGAGUAGAGGCAUUUAGGAACU | UUCCUAAAUGCCUCUACUCGGU |
| | [SEQ ID NO: 377] | [SEQ ID NO: 378] |
| XD-14926 | GGAACUUGGGGGCUAUUCCAUA | UGGAAUAGCCCCCAAGUUCCUA |
| | [SEQ ID NO: 379] | [SEQ ID NO: 380] |
| XD-14927 | ACUUGGGGGCUAUUCCAUAAUU | UUAUGGAAUAGCCCCCAAGUUC |
| | [SEQ ID NO: 381] | [SEQ ID NO: 382] |
| XD-14928 | UUGGGGGCUAUUCCAUAAUUCC | AAUUAUGGAAUAGCCCCCAAGU |
| | [SEQ ID NO: 383] | [SEQ ID NO: 384] |
| XD-14929 | GGGGGCUAUUCCAUAAUUCAAU | UGAAUUAUGGAAUAGCCCCCAA |
| | [SEQ ID NO: 385] | [SEQ ID NO: 386] |
| XD-14930 | GGGGCUAUUCCAUAAUUCCAUA | UGGAAUUAUGGAAUAGCCCCCA |
| | [SEQ ID NO: 387] | [SEQ ID NO: 388] |
| XD-14931 | CUCUGCUUGCCGAAACUGGAAG | UCCAGUUUCGGCAAGCAGAGCU |
| | [SEQ ID NO: 389] | [SEQ ID NO: 390] |
| XD-14932 | UUGCCGAAACUGGAAGUUAUUU | AUAACUUCCAGUUUCGGCAAGC |
| | [SEQ ID NO: 391] | [SEQ ID NO: 392] |
| XD-14933 | AUAACCCUUGAAAGUCAUGAAC | UCAUGACUUUCAAGGGUUAUUA |
| | [SEQ ID NO: 393] | [SEQ ID NO: 394] |
| XD-14934 | UGAACACAUCAGCUAGCAAAAG | UUUGCUAGCUGAUGUGUUCAUG |
| | [SEQ ID NO: 395] | [SEQ ID NO: 396] |
| XD-14935 | UGAUUCUUGCUGCUAUUACUGC | AGUAAUAGCAGCAAGAAUCACU |
| | [SEQ ID NO: 397] | [SEQ ID NO: 398] |
| XD-14936 | UGGAACGCCCUUUUACUAAACU | UUUAGUAAAAGGGCGUUCCAAG |
| | [SEQ ID NO: 399] | [SEQ ID NO: 400] |
| XD-14937 | GGAACGCCCUUUUACUAAAAUU | UUUUAGUAAAAGGGCGUUCCAA |
| | [SEQ ID NO: 401] | [SEQ ID NO: 402] |
| XD-14938 | GAACGCCCUUUUACUAAACUUG | AGUUUAGUAAAAGGGCGUUCCA |
| | [SEQ ID NO: 403] | [SEQ ID NO: 404] |
| XD-14939 | AACGCCCUUUUACUAAACUUGA | AAGUUUAGUAAAAGGGCGUUCC |
| | [SEQ ID NO: 405] | [SEQ ID NO: 406] |
| XD-14940 | AGUAAAUUCUUACCGUCAAACU | UUUGACGGUAAGAAUUUACUGA |
| | [SEQ ID NO: 407] | [SEQ ID NO: 408] |
| XD-14941 | GUAAAUUCUUACCGUCAAAAUG | UUUUGACGGUAAGAAUUUACUG |
| | [SEQ ID NO: 409] | [SEQ ID NO: 410] |
| XD-14942 | UCUUACCGUCAAACUGACGAAU | UCGUCAGUUUGACGGUAAGAAU |
| | [SEQ ID NO: 411] | [SEQ ID NO: 412] |
| XD-14943 | CUUACCGUCAAACUGACGGAUU | UCCGUCAGUUUGACGGUAAGAA |
| | [SEQ ID NO: 413] | [SEQ ID NO: 414] |
| XD-14944 | UUACCGUCAAACUGACGGAUUA | AUCCGUCAGUUUGACGGUAAGA |
| | [SEQ ID NO: 415] | [SEQ ID NO: 416] |
| XD-14945 | ACCGUCAAACUGACGGAUUAUU | UAAUCCGUCAGUUUGACGGUAA |
| | [SEQ ID NO: 417] | [SEQ ID NO: 418] |
| XD-14946 | CCGUCAAACUGACGGAUUAUUA | AUAAUCCGUCAGUUUGACGGUA |
| | [SEQ ID NO: 419] | [SEQ ID NO: 420] |
| XD-14947 | CGUCAAACUGACGGAUUAUUAU | AAUAAUCCGUCAGUUUGACGGU |
| | [SEQ ID NO: 421] | [SEQ ID NO: 422] |
| XD-14948 | GUCAAACUGACGGAUUAUUAUU | UAAUAAUCCGUCAGUUUGACGG |
| | [SEQ ID NO: 423] | [SEQ ID NO: 424] |
| XD-14949 | UCAAACUGACGGAUUAUUAUUU | AUAAUAAUCCGUCAGUUUGACG |
| | [SEQ ID NO: 425] | [SEQ ID NO: 426] |
| XD-14950 | ACUGACGGAUUAUUAUUUAUAA | AUAAAUAAUAAUCCGUCAGUUU |
| | [SEQ ID NO: 427] | [SEQ ID NO: 428] |
| XD-14951 | CUGACGGAUUAUUAUUUAUAAA | UAUAAAUAAUAAUCCGUCAGUU |
| | [SEQ ID NO: 429] | [SEQ ID NO: 430] |
| XD-14952 | AUGAGGUGAUCACUGUCUAAAG | UUAGACAGUGAUCACCUCAUCA |
| | [SEQ ID NO: 431] | [SEQ ID NO: 432] |
| XD-14953 | GAGGUGAUCACUGUCUACAAUG | UUGUAGACAGUGAUCACCUCAU |
| | [SEQ ID NO: 433] | [SEQ ID NO: 434] |
| XD-14954 | CUGUCUACAGUGGUUCAACUUU | AGUUGAACCACUGUAGACAGUG |
| | [SEQ ID NO: 435] | [SEQ ID NO: 436] |

[0136] In some embodiments, the isolated siRNA duplexes of the present disclosure, particularly when not delivered as an expression construct or within a vector, comprise at least one modified nucleotide, including a modified base, modified sugar, or modified backbone. siRNA having nucleotide modification(s) may have increased stability, increased specificity, reduced immunogenicity, or a combination thereof. Modified nucleotides may occur on either the guide strand, passenger strand, or both the guide strand and passenger strand.

[0137] Modified bases refer to nucleotide bases such as, for example, adenine, guanine, cytosine, thymine, uracil, xanthine, inosine, and queuosine that have been modified by the replacement or addition of one or more atoms or groups. Some examples of modifications on the nucleobase moieties include, but are not limited to, alkylated, halogenated, thiolated, aminated, amidated, or acetylated bases, individually or in combination. More specific examples include, for example, 5-propynyluridine, 5-propynylcytidine, 6-methyladenine, 6-methylguanine, N,N-dimethyladenine, 2-propyladenine, 2-propylguanine, 2-aminoadenine, 1-methylinosine, 3-methyluridine, 5-methylcytidine, 5-methyluridine and other nucleotides having a modification at the 5 position, 5-(2-amino)propyl uridine, 5-halocytidine, 5-halouridine, 4-acetylcytidine, 1-methyladenosine, 2-methyladenosine, 3-methylcytidine, 6-methyluridine, 2-methylguanosine, 7-methylguanosine, 2,2-dimethylguanosine, 5-methylaminoethyluridine, 5-methyloxyuridine, deazanucleotides such as 7-deaza-adenosine, 6-azouridine, 6-azocytidine, 6-azothymidine, 5-methyl-2-thiouridine, other thio bases such as 2-thiouridine and 4-thiouridine and 2-thiocytidine, dihydrouridine, pseudouridine, queuosine, archaeosine, naphthyl and substituted naphthyl groups, any O- and N-alkylated purines and pyrimidines such as N6-methyladenosine, 5-methylcarbonylmethyluridine, uridine 5-oxyacetic acid, pyridine-4-one, pyridine-2-one, phenyl and modified phenyl groups such as aminophenol or 2,4,6-trimethoxy benzene, modified cytosines that act as G-clamp nucleotides, 8-substituted adenines and guanines, 5-substituted uracils and thymines, azapyrimidines, carboxyhydroxyalkyl nucleotides, carboxyalkylaminoalkyl nucleotides, and alkylcarbonylalkylated nucleotides. Sugar modified nucleotides include, but are not limited to 2′-fluoro, 2′-amino and 2′-thio modified ribonucleotides, e.g., 2′-fluoro modified ribonucleotides.

[0138] Modified nucleotides may be modified on the sugar moiety, as well as be nucleotides having non-ribosyl sugars or analogs thereof. For example, the sugar moieties may be, or be based on, mannoses, arabinoses, glucopyranoses, galactopyranoses, 4′-thioribose, and other sugars, heterocycles, or carbocycles.

[0139] A normal “backbone,” as used herein, refers to the repeatingly alternating sugar-phosphate sequences in a DNA or RNA molecule. The deoxyribose/ribose sugars are joined at both the 3′-hydroxyl and 5′-hydroxyl groups to phosphate groups in ester links, also known as “phosphodiester” bonds or linkages. One or more, or all phosphodiester linkage(s) may be modified as phosphorothioate linkages, boranophosphate linkages, amide linkages, phosphorodithioate linkages, or triazole linkages.

[0140] In some embodiments, the inhibitory nucleic acid is a shRNA. In some embodiments, the shRNA is a stem-loop duplex molecule comprising a guide strand and passenger strand of a siRNA duplex as provided herein (e.g., siRNA duplexes of Tables 1 and 19), linked by a spacer sequence, i.e., loop. In some embodiments, loop sequence is 4, 5, 6, 7, 8, 9, 10, 11, 12, 13, 14, 15, 16, 17, 18, 19, 20, 21, 22, 23, 24, 25 nucleotides in length or 4-25, 4-24, 4-23, 4-22, 4-21, 4-20, 4-19, 4-18, 4-17, 4-16, 4-15, 4-14, 4-11, 4-10, 4-9, 4-8, 4-7, 4-6, 5-25, 5-24, 5-23, 5-22, 5-21, 5-20, 5-19, 5-18, 5-17, 5-16, 5-15, 5-14, 5-13, 5-12, 5-11, 5-10, 5-9, 5-8, 5-7, 6-25, 6-24, 6-23, 6-22, 6-21, 6-20, 6-19, 6-18, 6-17, 6-16, 6-15, 6-14, 6-13, 6-12, 6-11, 6-10, 6-9, 6-8, 7-25, 7-24, 7-23, 7-22, 7-21, 7-20, 7-19, 7-18, 7-17, 7-16, 7-15, 7-14, 7-13, 7-12, 7-11, 7-10, 7-9, 8-25, 8-24, 8-23, 8-22, 8-21, 8-20, 8-19, 8-18, 8-11, 8-10, 9-25, 9-24, 9-23, 9-22, 9-21, 9-20, 9-19, 9-18, 9-17, 9-16, 9-15, 9-14, 9-13, 9-12, 9-11, 10-25, 10-24, 10-23, 10-22, 10-21, 10-20, 10-19, 10-18, 10-17, 10-16, 10-15, 10-14, 10-13, 10-12, 11-25, 11-24, 11-23, 11-22, 11-20, 11-19, 11-18, 11-17, 11-16, 11-15, 11-14, 11-13, 12-25, 12-24, 12-23, 12-22, 12-21, 12-20, 12-19, 12-18, 12-17, 12-16, 12-15, or 12-14 nucleotides in length.

[0141] In some embodiments, the inhibitory nucleic acid is an isolated miRNA. A miRNA may be a pri-mRNA, a pre-mRNA, mature miRNA, or artificial miRNA. In some embodiments, a miRNA is comprised of a guide strand and passenger strand. In some embodiments, the guide strand and passenger strand are within the same nucleic acid strand, where the guide strand and passenger strand hybridize together to form a self-annealing duplex structure. MiRNA is initially transcribed as a pri-mRNA, which is processed by nuclear nuclease (e.g., Drosha-DGCR8 complex) into pre-mRNA. A pri-mRNA is a single-stranded molecule having a stem-loop structure. In some embodiments, the pri-miRNA is about 100, 150, 200, 300, 400, 500, 600, 700, 800, 900, 1000, 1200, 1300, 1400, 1500, 1600, 1700, 1800, 1900, 2000, 2500, 3000 or more nucleotides in length or about 100-3000, 100-2500, 100-2000, 100-1900, 100-1800, 100-1700, 100-1600, 100-1500, 100-1400, 100-1300, 100-1200, 100-1100, 100-1000, 100-900, 100-800, 100-700, 100-600, 100-500, 100-400, 100-300, 100-200, 100-150, 150-3000, 150-2500, 150-2000, 150-1900, 150-1800, 150-1700, 150-1600, 150-1500, 150-1400, 150-1300, 150-1200, 150-1100, 150-1000, 150-900, 150-800, 150-700, 150-600, 150-500, 150-400, 150-300, 150-200, 200-3000, 200-2500, 200-2000, 200-1900, 200-1800, 200-1700, 200-1600, 200-1500, 200-1400, 200-1300, 200-1200, 200-1100, 200-1000, 200-900, 200-800, 200-700, 200-600, 200-500, 200-400, 200-300, 300-3000, 300-2500, 300-2000, 300-1900, 300-1800, 300-1700, 300-1600, 300-1500, 300-1400, 300-1300, 300-1200, 300-1100, 300-1000, 300-900, 300-800, 300-700, 300-600, 300-500, 300-400, 400-3000, 400-2500, 400-2000, 400-1900, 400-1800, 400-1700, 400-1600, 400-1500, 400-1400, 400-1300, 400-1200, 400-1100, 400-1000, 400-900, 400-800, 400-700, 400-600, 400-500, 500-3000, 500-2500, 500-2000, 500-1900, 500-1800, 500-1700, 500-1600, 500-1500, 500-1400, 500-1300, 500-1200, 500-1100, 500-1000, 500-900, 500-800, 500-700, or 500-600 nucleotides in length.

[0142] Pre-miRNA is also a single-stranded molecule having a stem-loop structure. In some embodiments, the pre-miRNA is about 40, 50, 60, 70, 80, 90, 100, 200, 300, 400, or 500 nucleotides in length, or about 40-500, 40-400, 40-300, 40-200, 40-100, 40-90, 40-80, 40-70, 40-60, 40-50, 50-500, 50-400, 50-300, 50-200, 50-100, 50-90, 50-80, 50-70, 60-500, 60-400, 60-300, 60-200, 60-100, 60-90, 60-80, 70-500, 70-400, 70-300, 70-200, 70-100, 70-90, 80-500, 80-400, 80-300, 80-200, 80-100, 90-500, 90-400, 90-300, 90-200, 100-500, 100-400, 100-300, 100-200, 200-500, 200-400, 200-300, 300-500, 300-400, or 400-500 nucleotides in length.

[0143] The pre-miRNA is transported from the nucleus to the cytoplasm by exportin-5 and further processed by Dicer to produce a mature, double-stranded miRNA duplex comprising a guide strand and a passenger strand. The mature miRNA duplex is then incorporated into the RNA inducing silencing complex (RISC), mediated by TRBP (HIV transactivating response RNA-binding protein). The passenger strand is generally released and cleaved, while the guide strand remains in RISC and binds to the target mRNA and mediates silencing. In some embodiments, a mature miRNA refers to the guide strand of a mature miRNA duplex. In some embodiments, a mature miRNA is about 19, 20, 21, 22, 23, 24, 25, 26, 27, 28, 29, or 30 nucleotides in length, or ranges from about 19-30 nucleotides, 19-29 nucleotides, 19-28 nucleotides, 19-27 nucleotides, 19-26 nucleotides, 19-25 nucleotides, 19-24 nucleotides, 19-23 nucleotides, 19-21 nucleotides, 20-30 nucleotides, 20-29 nucleotides, 20-28 nucleotides, 20-27 nucleotides, 20-26 nucleotides, 20-25 nucleotides, 20-24 nucleotides, 20-23 nucleotides, 20-22 nucleotides, 21-30 nucleotides, 21-29 nucleotides, 21-28 nucleotides, 21-27 nucleotides, 21-26 nucleotides, 21-25 nucleotides, 21-24 nucleotides, 21-23 nucleotides, 22-30 nucleotides, 22-29 nucleotides, 22-28 nucleotides, 22-27 nucleotides, 22-26 nucleotides, 22-25 nucleotides, 22-24 nucleotides, 23-30 nucleotides, 23-29 nucleotides, 23-28 nucleotides, 23-27 nucleotides, 23-26 nucleotides, 23-25 nucleotides, 24-30 nucleotides, 24-29 nucleotides, 24-28 nucleotides, 24-27 nucleotides, 24-26 nucleotides, 25-30 nucleotides, 25-29 nucleotides, 25-28 nucleotides, 25-27 nucleotides, 26-30 nucleotides, 26-29 nucleotides, 26-28 nucleotides, 27-30 nucleotides, 27-29 nucleotides, or 28-30 nucleotides in length.

[0144] Artificial miRNA refers to an endogenous, modified or synthetic pri-mRNA or pre-mRNA scaffold or backbone capable of producing a functional mature miRNA, where the guide strand sequence and passenger strand sequence of the miRNA duplex within the stem region have been replaced with a guide strand sequence and passenger strand sequence of interest that directs silencing of the target mRNA of interest. Artificial miRNA design is described in Eamens et al. (2014) Methods Mol Biol. 1062:211-24 (incorporated by reference in its entirety). Synthetic miRNA backbones are described in U.S. Patent Publication 2008/0313773 (incorporated by reference in its entirety). In some embodiments, the artificial miRNA is about 100-200 nucleotides, 100-175 nucleotides 100-150 nucleotides, 125-200 nucleotides 125-175 nucleotides, or 125-150 nucleotides in length. In some embodiments, the artificial miRNA is about 100 nucleotides, about 120 nucleotides, about 130 nucleotides, about 140 nucleotides, about 150 nucleotides, about 160 nucleotides, about 170 nucleotides, about 180 nucleotides, about 190 nucleotides, or about 200 nucleotides in length.

[0145] In some embodiments, the miRNA is a pri-miRNA, a pre-mRNA, an artificial miRNA, or a mature miRNA comprising a guide strand sequence comprising or consisting of the nucleic acid sequence set forth in any one of the guide sequences of Tables 1, 3, 9, 11, 12, 13, 19, 23, 24, and 25, e.g., any one of SEQ ID NOS: 4, 6, 8, 10, 12, 14, 16, 18, 20, 22, 24, 26, 28, 30, 32, 34, 36, 38, 40, 42, 44, 46, 48, 50, 52, 54, 56, 58, 60, 62, 64, 66, 68, 70, 72, 74, 76, 78, 80, 82, 84, 86, 88, 90, 92, 94, 96, 98, 100, 102, 104, 106, 108, 110, 112, 114, 116, 118, 120, 124, 126, 128, 130, 132, 134, 136, 138, 140, 142, 144, 146, 148, 150, 152, 154, 156, 158, 160, 162, 164, 166, 168, 170, 172, 174, 176, 178, 180, 182, 184, 186, 188, 190, 192, 194, 196, 198, 200, 202, 204, 206, 208, 210, 212, 214, 216, 218, 220, 222, 224, 226, 228, 230, 232, 234, 236, 238, 240, 242, 244, 246, 248, 250, 252, 254, 256, 258, 260, 262, 264, 266, 268, 270, 272, 274, 276, 278, 280, 282, 284, 286, 288, 290, 292, 294, 296, 298, 300, 302, 304, 306, 308, 310, 312, 314, 316, 318, 320, 324, 326, 328, 330, 332, 334, 336, 338, 340, 342, 344, 346, 348, 350, 352, 354, 356, 358, 360, 362, 364, 366, 368, 370, 372, 374, 376, 378, 380, 382, 384, 386, 388, 390, 392, 394, 396, 398, 400, 402, 404, 406, 408, 410, 412, 414, 416, 418, 420, 422, 424, 426, 428, 430, 432, 434, 436, 1176-1288, 1811-1827, 2015, 2065, 2083, 2152, 2203, and 2209.

[0146] In some embodiments, the miRNA is a pri-miRNA, a pre-mRNA, an artificial miRNA, or a mature miRNA comprising a guide strand sequence comprising or consisting of the nucleic acid sequence set forth in any one of the guide sequences of Tables 1, 3, 9, 11, 12, 13, 19, 23, 24, and 25, e.g., any one of SEQ ID NOS: 4, 6, 8, 10, 12, 14, 16, 18, 20, 22, 24, 26, 28, 30, 32, 34, 36, 38, 40, 42, 44, 46, 48, 50, 52, 54, 56, 58, 60, 62, 64, 66, 68, 70, 72, 74, 76, 78, 80, 82, 84, 86, 88, 90, 92, 94, 96, 98, 100, 102, 104, 106, 108, 110, 112, 114, 116, 118, 120, 124, 126, 128, 130, 132, 134, 136, 138, 140, 142, 144, 146, 148, 150, 152, 154, 156, 158, 160, 162, 164, 166, 168, 170, 172, 174, 176, 178, 180, 182, 184, 186, 188, 190, 192, 194, 196, 198, 200, 202, 204, 206, 208, 210, 212, 214, 216, 218, 220, 222, 224, 226, 228, 230, 232, 234, 236, 238, 240, 242, 244, 246, 248, 250, 252, 254, 256, 258, 260, 262, 264, 266, 268, 270, 272, 274, 276, 278, 280, 282, 284, 286, 288, 290, 292, 294, 296, 298, 300, 302, 304, 306, 308, 310, 312, 314, 316, 318, 320, 324, 326, 328, 330, 332, 334, 336, 338, 340, 342, 344, 346, 348, 350, 352, 354, 356, 358, 360, 362, 364, 366, 368, 370, 372, 374, 376, 378, 380, 382, 384, 386, 388, 390, 392, 394, 396, 398, 400, 402, 404, 406, 408, 410, 412, 414, 416, 418, 420, 422, 424, 426, 428, 430, 432, 434, 436, 1176-1288, 1811-1827, 2015, 2065, 2083, 2152, 2203, and 2209, with at least 1, 2, 3, 4, or 5 mismatches to the target ATXN2 mRNA sequence.

[0147] In some embodiments, the miRNA is a pri-miRNA, a pre-mRNA, an artificial miRNA, or a mature miRNA comprising a guide strand sequence comprising or consisting of a sequence that is at least 60%, 70%, 75%, 80%, 85%, 90%, 95%, 97%, 99%, or 100% identical to any one of the guide sequences of Tables 1, 3, 9, 11, 12, 13, 19, 23, 24, and 25, e.g., any one of SEQ ID NOS: 4, 6, 8, 10, 12, 14, 16, 18, 20, 22, 24, 26, 28, 30, 32, 34, 36, 38, 40, 42, 44, 46, 48, 50, 52, 54, 56, 58, 60, 62, 64, 66, 68, 70, 72, 74, 76, 78, 80, 82, 84, 86, 88, 90, 92, 94, 96, 98, 100, 102, 104, 106, 108, 110, 112, 114, 116, 118, 120, 124, 126, 128, 130, 132, 134, 136, 138, 140, 142, 144, 146, 148, 150, 152, 154, 156, 158, 160, 162, 164, 166, 168, 170, 172, 174, 176, 178, 180, 182, 184, 186, 188, 190, 192, 194, 196, 198, 200, 202, 204, 206, 208, 210, 212, 214, 216, 218, 220, 222, 224, 226, 228, 230, 232, 234, 236, 238, 240, 242, 244, 246, 248, 250, 252, 254, 256, 258, 260, 262, 264, 266, 268, 270, 272, 274, 276, 278, 280, 282, 284, 286, 288, 290, 292, 294, 296, 298, 300, 302, 304, 306, 308, 310, 312, 314, 316, 318, 320, 324, 326, 328, 330, 332, 334, 336, 338, 340, 342, 344, 346, 348, 350, 352, 354, 356, 358, 360, 362, 364, 366, 368, 370, 372, 374, 376, 378, 380, 382, 384, 386, 388, 390, 392, 394, 396, 398, 400, 402, 404, 406, 408, 410, 412, 414, 416, 418, 420, 422, 424, 426, 428, 430, 432, 434, 436, 1176-1288, 1811-1827, 2015, 2065, 2083, 2152, 2203, and 2209.

[0148] In some embodiments, the miRNA is a pri-miRNA, a pre-mRNA, an artificial miRNA, or a mature miRNA comprising a guide strand sequence comprising or consisting of at least 15, 16, 17, 18, 19, 20, 21, or 22 contiguous nucleotides of a sequence of any one of the guide sequences of Tables 1, 3, 9, 11, 12, 13, 19, 23, 24, and 25, e.g., any one of SEQ ID NOS: 4, 6, 8, 10, 12, 14, 16, 18, 20, 22, 24, 26, 28, 30, 32, 34, 36, 38, 40, 42, 44, 46, 48, 50, 52, 54, 56, 58, 60, 62, 64, 66, 68, 70, 72, 74, 76, 78, 80, 82, 84, 86, 88, 90, 92, 94, 96, 98, 100, 102, 104, 106, 108, 110, 112, 114, 116, 118, 120, 124, 126, 128, 130, 132, 134, 136, 138, 140, 142, 144, 146, 148, 150, 152, 154, 156, 158, 160, 162, 164, 166, 168, 170, 172, 174, 176, 178, 180, 182, 184, 186, 188, 190, 192, 194, 196, 198, 200, 202, 204, 206, 208, 210, 212, 214, 216, 218, 220, 222, 224, 226, 228, 230, 232, 234, 236, 238, 240, 242, 244, 246, 248, 250, 252, 254, 256, 258, 260, 262, 264, 266, 268, 270, 272, 274, 276, 278, 280, 282, 284, 286, 288, 290, 292, 294, 296, 298, 300, 302, 304, 306, 308, 310, 312, 314, 316, 318, 320, 324, 326, 328, 330, 332, 334, 336, 338, 340, 342, 344, 346, 348, 350, 352, 354, 356, 358, 360, 362, 364, 366, 368, 370, 372, 374, 376, 378, 380, 382, 384, 386, 388, 390, 392, 394, 396, 398, 400, 402, 404, 406, 408, 410, 412, 414, 416, 418, 420, 422, 424, 426, 428, 430, 432, 434, 436, 1176-1288, 1811-1827, 2015, 2065, 2083, 2152, 2203, and 2209, preferably wherein the guide strand sequence retains positions 2-7 (“seed sequence”) of the selected SEQ ID NO.

[0149] In some embodiments, the miRNA is a pri-miRNA, a pre-mRNA, an artificial miRNA, or a mature miRNA comprising a guide strand sequence comprising or consisting of a sequence of any one of the guide sequences of Tables 1, 3, 9, 11, 12, 13, 19, 23, 24, and 25, e.g., any one of SEQ ID NOS: 4, 6, 8, 10, 12, 14, 16, 18, 20, 22, 24, 26, 28, 30, 32, 34, 36, 38, 40, 42, 44, 46, 48, 50, 52, 54, 56, 58, 60, 62, 64, 66, 68, 70, 72, 74, 76, 78, 80, 82, 84, 86, 88, 90, 92, 94, 96, 98, 100, 102, 104, 106, 108, 110, 112, 114, 116, 118, 120, 124, 126, 128, 130, 132, 134, 136, 138, 140, 142, 144, 146, 148, 150, 152, 154, 156, 158, 160, 162, 164, 166, 168, 170, 172, 174, 176, 178, 180, 182, 184, 186, 188, 190, 192, 194, 196, 198, 200, 202, 204, 206, 208, 210, 212, 214, 216, 218, 220, 222, 224, 226, 228, 230, 232, 234, 236, 238, 240, 242, 244, 246, 248, 250, 252, 254, 256, 258, 260, 262, 264, 266, 268, 270, 272, 274, 276, 278, 280, 282, 284, 286, 288, 290, 292, 294, 296, 298, 300, 302, 304, 306, 308, 310, 312, 314, 316, 318, 320, 324, 326, 328, 330, 332, 334, 336, 338, 340, 342, 344, 346, 348, 350, 352, 354, 356, 358, 360, 362, 364, 366, 368, 370, 372, 374, 376, 378, 380, 382, 384, 386, 388, 390, 392, 394, 396, 398, 400, 402, 404, 406, 408, 410, 412, 414, 416, 418, 420, 422, 424, 426, 428, 430, 432, 434, 436, 1176-1288, 1811-1827, 2015, 2065, 2083, 2152, 2203, and 2209, wherein 1, 2, 3, or 4 nucleotides at positions 19-22 differ from the selected SEQ ID NO (variant nucleotide(s)) such that the guide strand sequence is no longer complementary to the ATXN2 target sequence at the variant nucleotide(s).

[0150] In some embodiments, the miRNA is a pri-miRNA, a pre-mRNA, an artificial miRNA, or a mature miRNA comprising a guide strand sequence of Table 12. In some embodiments, the miRNA is a pri-miRNA, a pre-mRNA, an artificial miRNA, or a mature miRNA comprising a guide strand sequence comprising or consisting of the nucleic acid sequence set forth in any one of SEQ ID NOS: 12, 14, 40, 60, 100, 104, 108, 112, 124, 126, 128, 166, 198, 220, 242, 302, 306, 308, 330, 336, and 362. In some embodiments, the miRNA is a pri-miRNA, a pre-mRNA, an artificial miRNA, or a mature miRNA comprising a guide strand sequence comprising or consisting of the nucleic acid sequence set forth in any one of SEQ ID NOS: 12, 14, 40, 60, 100, 104, 108, 112, 124, 126, 128, 166, 198, 220, 242, 302, 306, 308, 330, 336, and 362, with at least 1, 2, 3, 4, or 5 mismatches to the target ATXN2 mRNA sequence. In some embodiments, the miRNA is a pri-miRNA, a pre-mRNA, an artificial miRNA, or a mature miRNA comprising a guide strand sequence comprising or consisting of a nucleic acid sequence that is at least 60%, 70%, 75%, 80%, 85%, 90%, 95%, 97%, 99%, or 100% identical to any one of SEQ ID NOS: 12, 14, 40, 60, 100, 104, 108, 112, 124, 126, 128, 166, 198, 220, 242, 302, 306, 308, 330, 336, and 362. In some embodiments, the miRNA is a pri-miRNA, a pre-mRNA, an artificial miRNA, or a mature miRNA comprising a guide strand sequence comprising or consisting of at least 15, 16, 17, 18, 19, 20, 21, or 22 contiguous nucleotides of a sequence of any one of SEQ ID NOS: 12, 14, 40, 60, 100, 104, 108, 112, 124, 126, 128, 166, 198, 220, 242, 302, 306, 308, 330, 336, and 362, preferably wherein the guide strand sequence retains positions 2-7 (“seed sequence”) of the selected SEQ ID NO. In some embodiments, the miRNA is a pri-miRNA, a pre-mRNA, an artificial miRNA, or a mature miRNA comprising a guide strand sequence comprising or consisting of a sequence of any one of SEQ ID NOS: 12, 14, 40, 60, 100, 104, 108, 112, 124, 126, 128, 166, 198, 220, 242, 302, 306, 308, 330, 336, and 362, wherein 1, 2, 3, or 4 nucleotides at positions 19-22 differ from the selected SEQ ID NO (variant nucleotide(s)) such that the guide strand sequence is no longer complementary to the ATXN2 target sequence at the variant nucleotide(s).

[0151] In some embodiments, the miRNA is a pri-miRNA, a pre-mRNA, an artificial miRNA, or a mature miRNA comprising a guide strand sequence of Table 13. In some embodiments, the miRNA is a pri-miRNA, a pre-mRNA, an artificial miRNA, or a mature miRNA comprising a guide strand sequence comprising or consisting of the nucleic acid sequence set forth in any one of SEQ ID NOS: 14, 40, 100, 108, 112, 128, 166, 198, 242, 308, 336, and 362. In some embodiments, the miRNA is a pri-miRNA, a pre-mRNA, an artificial miRNA, or a mature miRNA comprising a guide strand sequence comprising or consisting of the nucleic acid sequence set forth in any one of SEQ ID NOS: 14, 40, 100, 108, 112, 128, 166, 198, 242, 308, 336, and 362, with at least 1, 2, 3, 4, or 5 mismatches to the target ATXN2 mRNA sequence. In some embodiments, the miRNA is a pri-miRNA, a pre-mRNA, an artificial miRNA, or a mature miRNA comprising a guide strand sequence comprising or consisting of a nucleic acid sequence that is at least 60%, 70%, 75%, 80%, 85%, 90%, 95%, 97%, 99%, or 100% identical to any one of SEQ ID NOS: 14, 40, 100, 108, 112, 128, 166, 198, 242, 308, 336, and 362. In some embodiments, the miRNA is a pri-miRNA, a pre-mRNA, an artificial miRNA, or a mature miRNA comprising a guide strand sequence comprising or consisting of at least 15, 16, 17, 18, 19, 20, 21, or 22 contiguous nucleotides of a sequence of any one of SEQ ID NOS: 14, 40, 100, 108, 112, 128, 166, 198, 242, 308, 336, and 362, preferably wherein the guide strand sequence retains positions 2-7 (“seed sequence”) of the selected SEQ ID NO. In some embodiments, the miRNA is a pri-miRNA, a pre-mRNA, an artificial miRNA, or a mature miRNA comprising a guide strand sequence comprising or consisting of a sequence of any one of SEQ ID NOS: 14, 40, 100, 108, 112, 128, 166, 198, 242, 308, 336, and 362, wherein 1, 2, 3, or 4 nucleotides at positions 19-22 differ from the selected SEQ ID NO (variant nucleotide(s)) such that the guide strand sequence is no longer complementary to the ATXN2 target sequence at the variant nucleotide(s).

[0152] In some embodiments, the miRNA is a pri-miRNA, a pre-mRNA, an artificial miRNA, or a mature miRNA comprising a guide strand sequence of Table 19. In some embodiments, the miRNA is a pri-miRNA, a pre-mRNA, an artificial miRNA, or a mature miRNA comprising a guide strand sequence comprising or consisting of the nucleic acid sequence set forth in any one of SEQ ID NOS:1176-1288, 40, 108, and 166. In some embodiments, the miRNA is a pri-miRNA, a pre-mRNA, an artificial miRNA, or a mature miRNA comprising a guide strand sequence comprising or consisting of the nucleic acid sequence set forth in any one of SEQ ID NOS:1176-1288, 40, 108, and 166, with at least 1, 2, 3, 4, or 5 mismatches to the target ATXN2 mRNA sequence. In some embodiments, the miRNA is a pri-miRNA, a pre-mRNA, an artificial miRNA, or a mature miRNA comprising a guide strand sequence comprising or consisting of a nucleic acid sequence that is at least 60%, 70%, 75%, 80%, 85%, 90%, 95%, 97%, 99%, or 100% identical to any one of SEQ ID NOS:1176-1288, 40, 108, and 166. In some embodiments, the miRNA is a pri-miRNA, a pre-mRNA, an artificial miRNA, or a mature miRNA comprising a guide strand sequence comprising or consisting of at least 15, 16, 17, 18, 19, 20, 21, or 22 contiguous nucleotides of a sequence of any one of SEQ ID NOS: 1176-1288, 40, 108, and 166, preferably wherein the guide strand sequence retains positions 2-7 (“seed sequence”) of the selected SEQ ID NO. In some embodiments, the miRNA is a pri-miRNA, a pre-mRNA, an artificial miRNA, or a mature miRNA comprising a guide strand sequence comprising or consisting of a sequence of any one of SEQ ID NOS:1176-1288, 40, 108, and 166, wherein 1, 2, 3, or 4 nucleotides at positions 19-22 differ from the selected SEQ ID NO (variant nucleotide(s)) such that the guide strand sequence is no longer complementary to the ATXN2 target sequence at the variant nucleotide(s).

[0153] In some embodiments, the miRNA is a pri-miRNA, a pre-mRNA, an artificial miRNA, or a mature miRNA comprising a guide strand sequence of Table 23. In some embodiments, the miRNA is a pri-miRNA, a pre-mRNA, an artificial miRNA, or a mature miRNA comprising a guide strand sequence comprising or consisting of the nucleic acid sequence set forth in any one of SEQ ID NOS:1908-2007. In some embodiments, the miRNA is a pri-miRNA, a pre-mRNA, an artificial miRNA, or a mature miRNA comprising a guide strand sequence comprising or consisting of the nucleic acid sequence set forth in any one of SEQ ID NOS:1908-2007, with at least 1, 2, 3, 4, or 5 mismatches to the target ATXN2 mRNA sequence. In some embodiments, the miRNA is a pri-miRNA, a pre-mRNA, an artificial miRNA, or a mature miRNA comprising a guide strand sequence comprising or consisting of a nucleic acid sequence that is at least 60%, 70%, 75%, 80%, 85%, 90%, 95%, 97%, 99%, or 100% identical to any one of SEQ ID NOS:1908-2007. In some embodiments, the miRNA is a pri-miRNA, a pre-mRNA, an artificial miRNA, or a mature miRNA comprising a guide strand sequence comprising or consisting of at least 15, 16, 17, 18, 19, 20, 21, or 22 contiguous nucleotides of a sequence of any one of SEQ ID NOS:1908-2007, preferably wherein the guide strand sequence retains positions 2-7 (“seed sequence”) of the selected SEQ ID NO. In some embodiments, the miRNA is a pri-miRNA, a pre-mRNA, an artificial miRNA, or a mature miRNA comprising a guide strand sequence comprising or consisting of a sequence of any one of SEQ ID NOS:1908-2007, wherein 1, 2, 3, or 4 nucleotides at positions 19-22 differ from the selected SEQ ID NO (variant nucleotide(s)) such that the guide strand sequence is no longer complementary to the ATXN2 target sequence at the variant nucleotide(s).

[0154] In some embodiments, the miRNA is a pri-miRNA, a pre-mRNA, an artificial miRNA, or a mature miRNA comprising a guide strand sequence of Table 24. In some embodiments, the miRNA is a pri-miRNA, a pre-mRNA, an artificial miRNA, or a mature miRNA comprising a guide strand sequence comprising or consisting of the nucleic acid sequence set forth in any one of SEQ ID NOS:100, 112, 166, 202, 246, 306, 308, 314, 1180, 1185, 1196, 1200, 1211, 1213, 1215, 1216, 1224, 1811-1822, 1824-1827, 2015, 2065, 2083, 2152, 2203, and 2209. In some embodiments, the miRNA is a pri-miRNA, a pre-mRNA, an artificial miRNA, or a mature miRNA comprising a guide strand sequence comprising or consisting of the nucleic acid sequence set forth in any one of SEQ ID NOS:100, 112, 166, 202, 246, 306, 308, 314, 1180, 1185, 1196, 1200, 1211, 1213, 1215, 1216, 1224, 1811-1822, 1824-1827, 2015, 2065, 2083, 2152, 2203, and 2209, with at least 1, 2, 3, 4, or 5 mismatches to the target ATXN2 mRNA sequence. In some embodiments, the miRNA is a pri-miRNA, a pre-mRNA, an artificial miRNA, or a mature miRNA comprising a guide strand sequence comprising or consisting of a nucleic acid sequence that is at least 60%, 70%, 75%, 80%, 85%, 90%, 95%, 97%, 99%, or 100% identical to any one of SEQ ID NOS:100, 112, 166, 202, 246, 306, 308, 314, 1180, 1185, 1196, 1200, 1211, 1213, 1215, 1216, 1224, 1811-1822, 1824-1827, 2015, 2065, 2083, 2152, 2203, and 2209. In some embodiments, the miRNA is a pri-miRNA, a pre-mRNA, an artificial miRNA, or a mature miRNA comprising a guide strand sequence comprising or consisting of at least 15, 16, 17, 18, 19, 20, 21, or 22 contiguous nucleotides of a sequence of any one of SEQ ID NOS:100, 112, 166, 202, 246, 306, 308, 314, 1180, 1185, 1196, 1200, 1211, 1213, 1215, 1216, 1224, 1811-1822, 1824-1827, 2015, 2065, 2083, 2152, 2203, and 2209, preferably wherein the guide strand sequence retains positions 2-7 (“seed sequence”) of the selected SEQ ID NO. In some embodiments, the miRNA is a pri-miRNA, a pre-mRNA, an artificial miRNA, or a mature miRNA comprising a guide strand sequence comprising or consisting of a sequence of any one of SEQ ID NOS:100, 112, 166, 202, 246, 306, 308, 314, 1180, 1185, 1196, 1200, 1211, 1213, 1215, 1216, 1224, 1811-1822, 1824-1827, 2015, 2065, 2083, 2152, 2203, and 2209, wherein 1, 2, 3, or 4 nucleotides at positions 19-22 differ from the selected SEQ ID NO (variant nucleotide(s)) such that the guide strand sequence is no longer complementary to the ATXN2 target sequence at the variant nucleotide(s).

[0155] In some embodiments, the miRNA is a pri-miRNA, a pre-mRNA, an artificial miRNA, or a mature miRNA comprising a guide strand sequence of Table 25. In some embodiments, the miRNA is a pri-miRNA, a pre-mRNA, an artificial miRNA, or a mature miRNA comprising a guide strand sequence comprising or consisting of the nucleic acid sequence set forth in any one of SEQ ID NOS:1185, 1816, 1213, 1819, 2083, 1215, 1216, 1811, and 314. In some embodiments, the miRNA is a pri-miRNA, a pre-mRNA, an artificial miRNA, or a mature miRNA comprising a guide strand sequence comprising or consisting of the nucleic acid sequence set forth in any one of SEQ ID NOS:1185, 1816, 1213, 1819, 2083, 1215, 1216, 1811, and 314, with at least 1, 2, 3, 4, or 5 mismatches to the target ATXN2 mRNA sequence. In some embodiments, the miRNA is a pri-miRNA, a pre-mRNA, an artificial miRNA, or a mature miRNA comprising a guide strand sequence comprising or consisting of a nucleic acid sequence that is at least 60%, 70%, 75%, 80%, 85%, 90%, 95%, 97%, 99%, or 100% identical to any one of SEQ ID NOS:1185, 1816, 1213, 1819, 2083, 1215, 1216, 1811, and 314. In some embodiments, the miRNA is a pri-miRNA, a pre-mRNA, an artificial miRNA, or a mature miRNA comprising a guide strand sequence comprising or consisting of at least 15, 16, 17, 18, 19, 20, 21, or 22 contiguous nucleotides of a sequence of any one of SEQ ID NOS:1185, 1816, 1213, 1819, 2083, 1215, 1216, 1811, and 314, preferably wherein the guide strand sequence retains positions 2-7 (“seed sequence”) of the selected SEQ ID NO. In some embodiments, the miRNA is a pri-miRNA, a pre-mRNA, an artificial miRNA, or a mature miRNA comprising a guide strand sequence comprising or consisting of a sequence of any one of SEQ ID NOS:1185, 1816, 1213, 1819, 2083, 1215, 1216, 1811, and 314, wherein 1, 2, 3, or 4 nucleotides at positions 19-22 differ from the selected SEQ ID NO (variant nucleotide(s)) such that the guide strand sequence is no longer complementary to the ATXN2 target sequence at the variant nucleotide(s).

[0156] In some embodiments, the miRNA is a pri-miRNA, a pre-mRNA, an artificial miRNA, or a mature miRNA comprising a guide strand sequence comprising or consisting of the nucleic acid sequence set forth in any one of SEQ ID NOS:1185, 1816, 1213, and 1811. In some embodiments, the miRNA is a pri-miRNA, a pre-mRNA, an artificial miRNA, or a mature miRNA comprising a guide strand sequence comprising or consisting of the nucleic acid sequence set forth in any one of SEQ ID NOS:1185, 1816, 1213, and 1811, with at least 1, 2, 3, 4, or 5 mismatches to the target ATXN2 mRNA sequence. In some embodiments, the miRNA is a pri-miRNA, a pre-mRNA, an artificial miRNA, or a mature miRNA comprising a guide strand sequence comprising or consisting of a nucleic acid sequence that is at least 60%, 70%, 75%, 80%, 85%, 90%, 95%, 97%, 99%, or 100% identical to any one of SEQ ID NOS:1185, 1816, 1213, and 1811. In some embodiments, the miRNA is a pri-miRNA, a pre-mRNA, an artificial miRNA, or a mature miRNA comprising a guide strand sequence comprising or consisting of at least 15, 16, 17, 18, 19, 20, 21, or 22 contiguous nucleotides of a sequence of any one of SEQ ID NOS:1185, 1816, 1213, and 1811, preferably wherein the guide strand sequence retains positions 2-7 (“seed sequence”) of the selected SEQ ID NO. In some embodiments, the miRNA is a pri-miRNA, a pre-mRNA, an artificial miRNA, or a mature miRNA comprising a guide strand sequence comprising or consisting of a sequence of any one of SEQ ID NOS:1185, 1816, 1213, and 1811, wherein 1, 2, 3, or 4 nucleotides at positions 19-22 differ from the selected SEQ ID NO (variant nucleotide(s)) such that the guide strand sequence is no longer complementary to the ATXN2 target sequence at the variant nucleotide(s).

[0157] In some embodiments, an artificial miRNA comprises a guide strand sequence according to any of the embodiments described herein, contained within a miR backbone sequence. In some embodiments, the guide strand sequence and passenger strand sequence of the artificial miRNA are contained with a miRNA backbone sequence. In some embodiments, the miRNA backbone sequence is a miR-155 backbone sequence, a miR-155E backbone sequence, a miR-155M backbone sequence, a miR1-1 backbone sequence, a miR-1-1_M backbone sequence, a miR-100 backbone sequence, a miR-100_M backbone sequence, a miR-190A backbone sequence, a miR-124 backbone sequence, a miR-124_M backbone sequence, a miR-16-2 backbone sequence, a miR-132 backbone sequence, a miR-9 backbone sequence, a miR-138-2 backbone sequence, a miR-122 backbone sequence, a miR-122_M backbone sequence, a miR-130a backbone sequence, miR-128 backbone sequence, a miR-144 backbone sequence, a miR-451a backbone sequence, or a miR-223 backbone sequence.

[0158] In some embodiments, the miRNA backbone sequence is a miR-155E backbone sequence, a miR-155M backbone sequence, a miR1-1 backbone sequence, a miR-1-1_M backbone sequence, a miR-100 backbone sequence, a miR-100_M backbone sequence, a miR-190a backbone sequence, a miR-190a_M backbone sequence, a miR-124 backbone sequence, a miR-124_M backbone sequence, a miR-132 backbone sequence, a miR-138-2 backbone sequence, a miR-122 backbone sequence, a miR-122_M backbone sequence, a miR-130a backbone sequence, a miR-16-2 backbone sequence, a miR-128 backbone sequence, a miR-144 backbone sequence, a miR-451a backbone sequence, or a miR-223 backbone sequence.

[0159] In some embodiments, the miRNA backbone sequence is a miR1-1 backbone sequence, a miR-1-1_M backbone sequence, a miR-100 backbone sequence, a miR-100_M backbone sequence, a miR-122 backbone sequence, a miR-122_M backbone sequence, a miR-124 backbone sequence, a miR-130a backbone sequence, a miR-132 backbone sequence, a miR-138-2 backbone sequence, a miR-144 backbone sequence, a miR-155E backbone sequence, a miR-155M backbone sequence, a miR-190a_M backbone sequence, or a miR-190a_M backbone sequence.

[0160] In some embodiments, the miRNA backbone sequence is a miR-100 backbone sequence or miR-100_M backbone sequence.

[0161] Table 2 provides examples of DNA sequences representing segments in miR-1-1, miR-100, miR-122, miR-124, miR-128, miR-130a, miR-155E, miR-155-M, and miR-138-2 backbones. Table 21 provides examples of DNA sequences representing segments in miR-1-1, miR-1-1_M, miR-100, miR-100_M, miR-122, miR-122_M, miR-124, miR-124 M, miR-128, miR-130a, miR-155E, miR-155M, miR-138-2, miR-144, miR-190a, miR-190a_M, miR-132, miR-451a, miR-223, and miR-16-2 backbones. It is understood that RNA sequences of the miR backbone segments in Tables 2 and 21 may be obtained by converting the “T” nucleotides in the sequences of Tables 2 and 21 to “U” nucleotides. Artificial miRNAs may be designed to insert desired guide and passenger sequences of the present disclosure into the miRNA backbones as defined in Table 2 or 21, and optionally wherein the passenger sequence is designed according to the rules in Table 8. For example, an artificial miRNA with miR-100 backbone in DNA format (e.g., for insertion into a transfer plasmid) may be designed according to Table 21 comprising from 5′ to 3′:5′ miR context (flanking) sequence of SEQ ID NO:1529; 5′ basal stem sequence of SEQ ID NO:1530; desired guide sequence; loop sequence of SEQ ID NO:1531; desired passenger sequence designed according to the rules in Table 8; 3′ basal stem sequence of SEQ ID NO:1532; and 3′ miR context (flanking) sequence of SEQ ID NO:1533.

TABLE 2
Annotation of miR Backbone Sequences

| | 5′ miR context | | | | | | 3′ miR context |
|---|---|---|---|---|---|---|---|
| | (flanking | | | | | 3′ basal | (flanking |
| miR | segment) | 5′ basal stem | 5p | Terminal loop | 3p | stem | segment) |
| miR-1-1 | catgcagactgcct | TGGG | pas- | TATGGACCTGCTA | guide | CTCA | ggccgggacctctc |
| | gct | [SEQ ID NO: | sen- | AGCTA | | [SEQ ID NO: | tcgccgcactgagg |
| | [SEQ ID NO: | 492] | ger | [SEQ ID NO: | | 494] | ggcactccacacca |
| | 491] | | | 493] | | | cgggggccg |
| | | | | | | | [SEQ ID NO: |
| | | | | | | | 495] |
| miR-100 | CCCAAAAGAGAGAA | CCTGTTGCCACA | guide | GTATTAGTCCG | pas- | TGTGTCTGTTA | CAATCTCACGGACC |
| | GATATTGAGG | [SEQ ID NO: | | [SEQ ID NO: | sen- | GG | TGGGGCTTTGCTTA |
| | [SEQ ID NO: | 497] | | 498] | ger | [SEQ ID NO: | TATGCC |
| | 496] | | | | | 499] | [SEQ ID NO: |
| | | | | | | | 500] |
| miR-122 | ggctacagagttt | CCTTAGCAGAGCT | guide | TGTCTAAACTAT | pas- | TAGCTACTGCT | aatccttccctcga |
| | [SEQ ID NO: | G | | [SEQ ID NO: | sen- | AGGC | taaatgtcttggca |
| | 501] | [SEQ ID NO: | | 503] | ger | [SEQ ID NO: | tcgtttgctttg |
| | | 502] | | | | 504] | [SEQ ID NO: |
| | | | | | | | 505] |
| miR-124 | TTCCTTCCTCAGGA | AGGCCTCTCTC | pas- | ATTTAAATGTCCA | guide | GAATGGGGCTC | GCTGAGCACCGTGG |
| | GAA | [SEQ ID NO: | sen- | TACAAT | | [SEQ ID NO: | GTCGGCGAGGGCCC |
| | [SEQ ID NO: | 507] | ger | [SEQ ID NO: | | 509] | GCCAagga |
| | 506] | | | 508] | | | [SEQ ID NO: |
| | | | | | | | 510] |
| miR-128 | ATTTtgcaataatt | TGAGCTGTTGGA | pas- | GAGGTTTACATTT | guide | TTCAGCTGCTT | ctggcttcttttta |
| | ggccttgttcc | [SEQ ID NO: | sen- | C | | C | ctcaggtttccact |
| | [SEQ ID NO: | 512] | ger | [SEQ ID NO: | | [SEQ ID NO: | gct |
| | 511] | | | 513] | | 514] | [SEQ ID NO: |
| | | | | | | | 515] |
| miR-130a | gcagggccggcatg | TGCTGCTGGCCA | pas- | CTGTCTGCACCTG | guide | TGGCCGTGTAG | Ctacccagcgctgg |
| | cctc | [SEQ ID NO: | sen- | TCACTAG | | TG | ctgcctcctcagca |
| | [SEQ ID NO: | 517] | ger | [SEQ ID NO: | | [SEQ ID NO: | ttg |
| | 516] | | | 518] | | 519] | [SEQ ID NO: |
| | | | | | | | 520] |
| miR-155E | CTGGAGGCTTGCTT | GGGCTGTATGCTG | guide | TTTTGGCCTCTGA | pas- | CAGGACAAGGC | TTTATCAGCACTCA |
| | T | [SEQ ID NO: | | CTGA | sen- | CC | CATGGAACAAATGG |
| | [SEQ ID NO: | 522] | | [SEQ ID NO: | ger | [SEQ ID NO: | CCACCGTG |
| | 521] | | | 523] | | 524] | [SEQ ID NO: |
| | | | | | | | 525] |
| miR-155- | CCTGGAGGCTTGCT | AGGCTGTATGCTG | guide | TTTTGGCCACTGA | pas- | CAGGACACAAG | TGTTACTAGCACTC |
| M | GA | [SEQ ID NO: | | CTGA | sen- | GCC | ACATGGAACAAATG |
| | [SEQ ID NO: | 527] | | [SEQ ID NO: | ger | [SEQ ID NO: | GCCACC |
| | 526] | | | 528] | | 529] | [SEQ ID NO: |
| | | | | | | | 530] |
| miR-138- | gccggcggagttct | CGTTGCTGC | guide | GACGAGCAGCGCA | pas- | GTTGCATCA | tacccatcctctcc |
| 2 | ggtat | [SEQ ID NO: | | TCCTCTTACCC | sen- | [SEQ ID NO: | aggcgagcctcgtg |
| | [SEQ ID NO: | 532] | | [SEQ ID NO: | ger | 534] | ggacc |
| | 531] | | | 533] | | | [SEQ ID NO: |
| | | | | | | | 535] |

[0162] In some embodiments, the terminal loop, stem, 5′ flanking segment, 3′ flanking segment, or any combination thereof of the miR-155 backbone sequence, miR1-1 backbone sequence, miR-100 backbone sequence, miR-190A backbone sequence, miR-124 backbone sequence, miR-16-2 backbone sequence, miR-132 backbone sequence, miR-9 backbone sequence, miR-138-2 backbone sequence, miR-122 backbone sequence, miR-130a backbone sequence, miR-128 backbone sequence, miR-144 backbone sequence, miR-451a backbone sequence, or miR-223 backbone sequence is modified (e.g., has nucleotide insertion, deletion, substitution, mismatch, wobble, or any combination thereof).

[0163] Sequence motifs that enable efficient processing of pri-miRNA backbones have previously been identified. These include an UG motif at the 5′ end of the pre-miRNA, a mismatched GHG motif in the stem, and a 3′ CNNC motif. In some embodiments, the miR backbone sequence has been modified to incorporate these motifs, including for example, miR-155E backbone sequence, miR-1-1_M backbone, miR-100_M backbone sequence, miR-124_M backbone sequence, and miR-122_M backbone sequence. Such modified miR backbones are labeled herein by the suffix “_M.”

[0164] In some embodiments, the miRNA (pri-miRNA, a pre-mRNA, an artificial miRNA, or a mature miRNA) comprises or consists of a guide strand sequence and corresponding passenger strand sequence of any one of the duplexe sequences set forth in Tables 1, 19, 23, and 24. In some embodiments, the passenger strand sequence of the miRNA comprises a sequence that is 100% complementary or perfectly complementary to the guide strand sequence. For example, a guide strand sequence may comprise or consist of a sequence of SEQ ID NO: 4, 6, 8, 10, 12, 14, 16, 18, 20, 22, 24, 26, 28, 30, 32, 34, 36, 38, 40, 42, 44, 46, 48, 50, 52, 54, 56, 58, 60, 62, 64, 66, 68, 70, 72, 74, 76, 78, 80, 82, 84, 86, 88, 90, 92, 94, 96, 98, 100, 102, 104, 106, 108, 110, 112, 114, 116, 118, 120, 124, 126, 128, 130, 132, 134, 136, 138, 140, 142, 144, 146, 148, 150, 152, 154, 156, 158, 160, 162, 164, 166, 168, 170, 172, 174, 176, 178, 180, 182, 184, 186, 188, 190, 192, 194, 196, 198, 200, 202, 204, 206, 208, 210, 212, 214, 216, 218, 220, 222, 224, 226, 228, 230, 232, 234, 236, 238, 240, 242, 244, 246, 248, 250, 252, 254, 256, 258, 260, 262, 264, 266, 268, 270, 272, 274, 276, 278, 280, 282, 284, 286, 288, 290, 292, 294, 296, 298, 300, 302, 304, 306, 308, 310, 312, 314, 316, 318, 320, 324, 326, 328, 330, 332, 334, 336, 338, 340, 342, 344, 346, 348, 350, 352, 354, 356, 358, 360, 362, 364, 366, 368, 370, 372, 374, 376, 378, 380, 382, 384, 386, 388, 390, 392, 394, 396, 398, 400, 402, 404, 406, 408, 410, 412, 414, 416, 418, 420, 422, 424, 426, 428, 430, 432, 434, or 436 (guide sequences in Table 1), and the passenger strand sequence may comprise or consist of a sequence of SEQ ID NO: 3, 5, 7, 9, 11, 13, 15, 17, 19, 21, 23, 25, 27, 29, 31, 33, 35, 37, 39, 41, 43, 45, 47, 49, 51, 53, 55, 57, 59, 61, 63, 65, 67, 69, 71, 73, 75, 77, 79, 81, 83, 85, 87, 89, 91, 93, 95, 97, 99, 101, 103, 105, 107, 109, 111, 113, 115, 117, 119, 121, 123, 125, 127, 129, 131, 133, 135, 137, 139, 141, 143, 145, 147, 149, 151, 153, 155, 157, 159, 161, 163, 165, 167, 169, 171, 173, 175, 177, 179, 181, 183, 185, 187, 189, 191, 193, 195, 197, 199, 201, 203, 205, 207, 209, 211, 213, 215, 217, 219, 221, 223, 225, 227, 229, 231, 233, 235, 237, 239, 241, 243, 245, 247, 249, 251, 253, 255, 257, 259, 261, 263, 265, 267, 269, 271, 273, 275, 277, 279, 281, 283, 285, 287, 289, 291, 293, 295, 297, 299, 301, 303, 305, 307, 309, 311, 313, 315, 317, 319, 321, 323, 325, 327, 329, 331, 333, 335, 337, 339, 341, 343, 345, 347, 349, 351, 353, 355, 357, 359, 361, 363, 365, 367, 369, 371, 373, 375, 377, 379, 381, 383, 385, 387, 389, 391, 393, 395, 397, 399, 401, 403, 405, 407, 409, 411, 413, 415, 417, 419, 421, 423, 425, 427, 429, 431, 433, or 435 (passenger sequences in Table 1), respectively. In some embodiments, the passenger strand sequence of the miRNA is not 100% complementary or to the guide strand sequence. For example, a guide strand sequence may comprise or consist of a sequence of SEQ ID NO:1176 and the corresponding passenger strand sequence may comprise or consist of a sequence of SEQ ID NO:1289 (see, Table 19).

[0165] In some embodiments, the miRNA (pri-miRNA, a pre-mRNA, an artificial miRNA, or a mature miRNA) comprises a guide strand sequence comprising or consisting of any one of SEQ ID NOS: 12, 14, 40, 60, 100, 104, 108, 112, 124, 126, 128, 166, 198, 220, 242, 302, 306, 308, 330, 336, and 362, and a passenger strand sequence of comprising a sequence that is 100% complementary or perfectly complementary to the guide strand sequence. For example, a guide strand sequence may comprise or consist of a sequence of SEQ ID NO: 12, 14, 40, 60, 100, 104, 108, 112, 124, 126, 128, 166, 198, 220, 242, 302, 306, 308, 330, 336, or 362, and the passenger strand sequence may comprise or consist of a sequence of SEQ ID NO: 11, 13, 39, 59, 99, 103, 107, 111, 123, 125, 127, 165, 197, 219, 241, 301, 305, 307, 329, 335, or 361, respectively.

[0166] In some embodiments, the miRNA (pri-miRNA, a pre-mRNA, an artificial miRNA, or a mature miRNA) comprises a guide strand sequence comprising or consisting of any one of SEQ ID NOS: 14, 40, 100, 108, 112, 128, 166, 198, 242, 308, 336, and 362, and the passenger strand sequence of the miRNA comprises or consists of a sequence that is 100% complementary or perfectly complementary to the guide strand. For example, a guide strand sequence may comprise a sequence of SEQ ID NO: 14, 40, 100, 108, 112, 128, 166, 198, 242, 308, 336, or 362, and the passenger strand sequence may comprise a sequence of SEQ ID NO: 13, 39, 99, 107, 111, 127, 165, 197, 241, 307, 335, or 361, respectively.

[0167] In some embodiments, the miRNA (pri-miRNA, a pre-mRNA, an artificial miRNA, or a mature miRNA) comprises a guide strand sequence comprising or consisting of any one of the guide sequences of Tables 1, 19, 23, and 24 and the passenger strand sequence comprises or consists of a corresponding passenger sequence of Tables 1, 19, 23, and 24 that has 1, 2, 3, 4, 5, 6, 7, 8, 9, 10, or more insertions, deletions, substitutions, mismatches, wobbles, or any combination thereof relative to the passenger strand sequence of Tables 1, 19, 23 and 24. In some embodiments, the miRNA (pri-miRNA, a pre-mRNA, an artificial miRNA, or a mature miRNA) comprises a guide strand sequence comprising or consisting of any one of SEQ ID NOs: 4, 6, 8, 10, 12, 14, 16, 18, 20, 22, 24, 26, 28, 30, 32, 34, 36, 38, 40, 42, 44, 46, 48, 50, 52, 54, 56, 58, 60, 62, 64, 66, 68, 70, 72, 74, 76, 78, 80, 82, 84, 86, 88, 90, 92, 94, 96, 98, 100, 102, 104, 106, 108, 110, 112, 114, 116, 118, 120, 124, 126, 128, 130, 132, 134, 136, 138, 140, 142, 144, 146, 148, 150, 152, 154, 156, 158, 160, 162, 164, 166, 168, 170, 172, 174, 176, 178, 180, 182, 184, 186, 188, 190, 192, 194, 196, 198, 200, 202, 204, 206, 208, 210, 212, 214, 216, 218, 220, 222, 224, 226, 228, 230, 232, 234, 236, 238, 240, 242, 244, 246, 248, 250, 252, 254, 256, 258, 260, 262, 264, 266, 268, 270, 272, 274, 276, 278, 280, 282, 284, 286, 288, 290, 292, 294, 296, 298, 300, 302, 304, 306, 308, 310, 312, 314, 316, 318, 320, 324, 326, 328, 330, 332, 334, 336, 338, 340, 342, 344, 346, 348, 350, 352, 354, 356, 358, 360, 362, 364, 366, 368, 370, 372, 374, 376, 378, 380, 382, 384, 386, 388, 390, 392, 394, 396, 398, 400, 402, 404, 406, 408, 410, 412, 414, 416, 418, 420, 422, 424, 426, 428, 430, 432, 434, 436, and a passenger strand sequence comprising or consisting a sequence of SEQ ID NOS: 3, 5, 7, 9, 11, 13, 15, 17, 19, 21, 23, 25, 27, 29, 31, 33, 35, 37, 39, 41, 43, 45, 47, 49, 51, 53, 55, 57, 59, 61, 63, 65, 67, 69, 71, 73, 75, 77, 79, 81, 83, 85, 87, 89, 91, 93, 95, 97, 99, 101, 103, 105, 107, 109, 111, 113, 115, 117, 119, 121, 123, 125, 127, 129, 131, 133, 135, 137, 139, 141, 143, 145, 147, 149, 151, 153, 155, 157, 159, 161, 163, 165, 167, 169, 171, 173, 175, 177, 179, 181, 183, 185, 187, 189, 191, 193, 195, 197, 199, 201, 203, 205, 207, 209, 211, 213, 215, 217, 219, 221, 223, 225, 227, 229, 231, 233, 235, 237, 239, 241, 243, 245, 247, 249, 251, 253, 255, 257, 259, 261, 263, 265, 267, 269, 271, 273, 275, 277, 279, 281, 283, 285, 287, 289, 291, 293, 295, 297, 299, 301, 303, 305, 307, 309, 311, 313, 315, 317, 319, 321, 323, 325, 327, 329, 331, 333, 335, 337, 339, 341, 343, 345, 347, 349, 351, 353, 355, 357, 359, 361, 363, 365, 367, 369, 371, 373, 375, 377, 379, 381, 383, 385, 387, 389, 391, 393, 395, 397, 399, 401, 403, 405, 407, 409, 411, 413, 415, 417, 419, 421, 423, 425, 427, 429, 431, 433, 435, respectively, wherein the passenger strand sequence has 1, 2, 3, 4, 5, 6, 7, 8, 9, 10, or more insertions, deletions, substitutions, mismatches, wobbles, or any combination thereof relative to the passenger strand sequence of SEQ ID NOS: 3, 5, 7, 9, 11, 13, 15, 17, 19, 21, 23, 25, 27, 29, 31, 33, 35, 37, 39, 41, 43, 45, 47, 49, 51, 53, 55, 57, 59, 61, 63, 65, 67, 69, 71, 73, 75, 77, 79, 81, 83, 85, 87, 89, 91, 93, 95, 97, 99, 101, 103, 105, 107, 109, 111, 113, 115, 117, 119, 121, 123, 125, 127, 129, 131, 133, 135, 137, 139, 141, 143, 145, 147, 149, 151, 153, 155, 157, 159, 161, 163, 165, 167, 169, 171, 173, 175, 177, 179, 181, 183, 185, 187, 189, 191, 193, 195, 197, 199, 201, 203, 205, 207, 209, 211, 213, 215, 217, 219, 221, 223, 225, 227, 229, 231, 233, 235, 237, 239, 241, 243, 245, 247, 249, 251, 253, 255, 257, 259, 261, 263, 265, 267, 269, 271, 273, 275, 277, 279, 281, 283, 285, 287, 289, 291, 293, 295, 297, 299, 301, 303, 305, 307, 309, 311, 313, 315, 317, 319, 321, 323, 325, 327, 329, 331, 333, 335, 337, 339, 341, 343, 345, 347, 349, 351, 353, 355, 357, 359, 361, 363, 365, 367, 369, 371, 373, 375, 377, 379, 381, 383, 385, 387, 389, 391, 393, 395, 397, 399, 401, 403, 405, 407, 409, 411, 413, 415, 417, 419, 421, 423, 425, 427, 429, 431, 433, 435, respectively. In some embodiments, a mismatch is a G→C, C→G, A→T, or T→A conversion in the passenger strand sequence. In some embodiments, a mismatch (to create a bulge with the guide strand) is a G→T, C→A, A→C, or T→G conversion in the passenger strand sequence. In some embodiments, a wobble is a G-U wobble, wherein a C is converted to a T in the passenger strand sequence. In some embodiments, the passenger strand sequence is modified according to the rules of Table 8.

[0168] In some embodiments, the miRNA (pri-miRNA, a pre-mRNA, an artificial miRNA, or a mature miRNA) comprises a guide strand sequence comprising or consisting of any one of SEQ ID NOS: 12, 14, 40, 60, 100, 104, 108, 112, 124, 126, 128, 166, 198, 220, 242, 302, 306, 308, 330, 336, and 362, and a passenger strand sequence comprising or consisting of a sequence that has 1, 2, 3, 4, 5, 6, 7, 8, 9, 10, or more insertions, deletions, substitutions, mismatches, wobbles, or any combination thereof relative to the passenger strand sequence comprising or consisting of a sequence of SEQ ID NOS: 11, 13, 39, 59, 99, 103, 107, 11, 123, 125, 127, 165, 197, 219, 241, 301, 305, 307, 329, 335, and 361, respectively. In some embodiments, a mismatch is a G→C, C→G, A→T, or T→A conversion in the passenger strand sequence. In some embodiments, a mismatch (to create a bulge with the guide strand) is a G→T, C→A, A→C, or T→G conversion in the passenger strand sequence. In some embodiments, a wobble is a G-U wobble, wherein a C is converted to a T in the passenger strand sequence. In some embodiments, the passenger strand sequence is modified according to the rules of Table 8.

[0169] In some embodiments, the miRNA (pri-miRNA, a pre-mRNA, an artificial miRNA, or a mature miRNA) comprises a guide strand sequence comprising or consisting of any one of SEQ ID NOS: 14, 40, 100, 108, 112, 128, 166, 198, 242, 308, 336, and 362, and a passenger strand sequence comprising or consisting of a sequence that has 1, 2, 3, 4, 5, 6, 7, 8, 9, 10, or more insertions, deletions, substitutions, mismatches, wobbles, or any combination thereof relative to the passenger strand sequence comprising or consisting of a sequence of SEQ ID NO: 13, 39, 99, 107, 111, 127, 165, 197, 241, 307, 335, or 361, respectively. In some embodiments, a mismatch is a G→C, C→G, A→T, or T→A conversion in the passenger strand sequence. In some embodiments, a mismatch (to create a bulge with the guide strand) is a G→T, C→A, A→C, or T→G conversion in the passenger strand sequence. In some embodiments, a wobble is a G-U wobble, wherein a C is converted to a T in the passenger strand sequence. In some embodiments, the passenger strand sequence is modified according to the rules of Table 8.

[0170] In some embodiments, the miRNA is an artificial miRNA comprising a guide strand sequence according to any of the embodiments described herein, contained within a miR-155 backbone sequence, miR1-1 backbone sequence, miR-100 backbone sequence, miR-124 backbone sequence, mIR-138-2 backbone sequence, miR-122 backbone sequence, miR-128 backbone sequence, miR-130a backbone sequence, or miR-16-2 backbone sequence, wherein the artificial miRNA comprises a passenger strand sequence that is modified according to Table 8. In some embodiments, the passenger strand sequence comprises a mismatch, wherein a mismatch is a G→C, C→G, A→T, or T→A conversion in the passenger strand sequence; a mismatch (to create a bulge with the guide strand) is a G→T, C→A, A→C, or T→G conversion in the passenger strand sequence; and a wobble is a G-U wobble, wherein a C is converted to a T in the passenger strand sequence.

[0171] In some embodiments, an artificial miRNA comprises or consists of a nucleic acid sequence set forth in any one of Tables 3, 9, 11, 19, 23, 24, and 25. In some embodiments, an artificial miRNA comprises or consists of a nucleic acid sequence of any one of SEQ ID NOS: 443-490, 1109-1111, 1114, 1121-1168, 1405-1520, 1908-2007, 2011, 2017, 2021, 2025, 2027, 2031, 2035, 2039, 2041, 2045, 2049, 2053, 2057, 2061, 2067, 2071, 2075, 2079, 2085, 2089, 2093, 2097, 2101, 2105, 2109, 2113, 2117, 2120, 2124, 2128, 2132, 2136, 2140, 2144, 2148, 2154, 2158, 2162, 2166, 2170, 2174, 2176, 2180, 2182, 2184, 2187, 2189, 2191, 2193, 2195, 2197, 2199, 2205, 2211, 2261, 2263, 2265, and 2267.

TABLE 3
ATXN2 Specific amiRNAs

| | Parent | miR | | |
|---|---|---|---|---|
| Parent Guide Sequence | Duplex ID | Backbone | Category | amiRNA Sequence |
| AGGAACGUGGGUUGAACUCCUU | XD-14857 | miR-1-1 | 911 Control | CAUGCAGACUGCCUGCUUGGGAUGGAGUUCAAGGGACGUCGCC |
| [SEQ ID NO: 242] | | | | UUAUGGACCUGCUAAGCUAAGGAACGUCCCUUGAACUCCUUCU |
| | | | | CAGGCCGGGACCUCUCUCGCCGCACUGAGGGGCACUCCACACC |
| | | | | ACGGGGGCC |
| | | | | [SEQ ID NO: 437] |
| AGGAACGUGGGUUGAACUCCUU | XD-14857 | miR-155E | 911 Control | CUGGAGGCUUGCUUUGGGCUGUAUGCUGAGGAACGUCCCUUGA |
| [SEQ ID NO: 242] | | | | ACUCCUUUUUUGGCCUCUGACUGAAAGGAGUUAAGGACGUUCC |
| | | | | UCAGGACAAGGCCCUUUAUCAGCACUCACAUGGAACAAAUGGC |
| | | | | CACCGUG |
| | | | | [SEQ ID NO: 438] |
| UUCGGGUUGAAAUCUGAAGUGU | XD-14790 | miR-155E | 911 Control | CUGGAGGCUUGCUUUGGGCUGUAUGCUGUUCGGGUUCUUAUCU |
| [SEQ ID NO: 108] | | | | GAAGUGUUUUUGGCCUCUGACUGAACACUUCAAUAGAACCCGA |
| | | | | ACAGGACAAGGCCCUUUAUCAGCACUCACAUGGAACAAAUGGC |
| | | | | CACCGUG |
| | | | | [SEQ ID NO: 439] |
| UUCGGGUUGAAAUCUGAAGUGU | XD-14790 | miR-1-1 | 911 Control | CAUGCAGACUGCCUGCUUGGGAGACUUCAGAUAAGAACCGAGA |
| [SEQ ID NO: 108] | | | | AUAUGGACCUGCUAAGCUAUUCGGGUUCUUAUCUGAAGUGUCU |
| | | | | CAGGCCGGGACCUCUCUCGCCGCACUGAGGGGCACUCCACACC |
| | | | | ACGGGGGCC |
| | | | | [SEQ ID NO: 440] |
| UUGAUUUCGAGGAUGUCGCUGG | XD-14800 | miR-155E | 911 Control | CUGGAGGCUUGCUUUGGGCUGUAUGCUGUUGAUUUCCUCGAUG |
| [SEQ ID NO: 128] | | | | UCGCUGGUUUUGGCCUCUGACUGACCAGCGACUCGGGAAAUCA |
| | | | | ACAGGACAAGGCCCUUUAUCAGCACUCACAUGGAACAAAUGGC |
| | | | | CACCGUG |
| | | | | [SEQ ID NO: 441] |
| UUGAUUUCGAGGAUGUCGCUGG | XD-14800 | miR-1-1 | 911 Control | CAUGCAGACUGCCUGCUUGGGCGAGCGACAUCGAGGAAACGCA |
| [SEQ ID NO: 128] | | | | AUAUGGACCUGCUAAGCUAUUGAUUUCCUCGAUGUCGCUGGCU |
| | | | | CAGGCCGGGACCUCUCUCGCCGCACUGAGGGGCACUCCACACC |
| | | | | ACGGGGGCC |
| | | | | [SEQ ID NO: 442] |
| AGAAAUCGUAGACUGAGGCAGU | XD-14743 | miR-1-1 | Atxn2 | CAUGCAGACUGCCUGCUUGGGAGUGCCUCAGUCUACGAUCGUC |
| [SEQ ID NO: 14] | | | targeting | UUAUGGACCUGCUAAGCUAAGAAAUCGUAGACUGAGGCAGUCU |
| | | | | CAGGCCGGGACCUCUCUCGCCGCACUGAGGGGCACUCCACACC |
| | | | | ACGGGGGCC |
| | | | | [SEQ ID NO: 443] |
| AGAAAUCGUAGACUGAGGCAGU | XD-14743 | miR-155E | Atxn2 | CUGGAGGCUUGCUUUGGGCUGUAUGCUGAGAAAUCGUAGACUG |
| [SEQ ID NO: 14] | | | targeting | AGGCAGUUUUUGGCCUCUGACUGAACUGCCUCGUCACGAUUUC |
| | | | | UCAGGACAAGGCCCUUUAUCAGCACUCACAUGGAACAAAUGGC |
| | | | | CACCGUG |
| | | | | [SEQ ID NO: 444] |
| AGAUACGUCAUUUUCCAAAGCC | XD-14766 | miR-1-1 | Atxn2 | CAUGCAGACUGCCUGCUUGGGGCCUUUGGAAAAUGACGUCCUC |
| [SEQ ID NO: 60] | | | targeting | UUAUGGACCUGCUAAGCUAAGAUACGUCAUUUUCCAAAGCCCU |
| | | | | CAGGCCGGGACCUCUCUCGCCGCACUGAGGGGCACUCCACACC |
| | | | | ACGGGGGCC |
| | | | | [SEQ ID NO: 445] |
| AGAUACGUCAUUUUCCAAAGCC | XD-14766 | miR-155E | Atxn2 | CUGGAGGCUUGCUUUGGGCUGUAUGCUGAGAUACGUCAUUUUC |
| [SEQ ID NO: 60] | | | targeting | CAAAGCCUUUUGGCCUCUGACUGAGGCUUUGGAAAGACGUAUC |
| | | | | UCAGGACAAGGCCCUUUAUCAGCACUCACAUGGAACAAAUGGC |
| | | | | CACCGUG |
| | | | | [SEQ ID NO: 446] |
| AGCGUUAGGGUGCGCAUACUGC | XD-14904 | miR-155E | Atxn2 | CUGGAGGCUUGCUUUGGGCUGUAUGCUGAGCGUUAGGGUGCGC |
| [SEQ ID NO : 336] | | | targeting | AUACUGCUUUUGGCCUCUGACUGAGCAGUAUGGCACCUAACGC |
| | | | | UCAGGACAAGGCCCUUUAUCAGCACUCACAUGGAACAAAUGGC |
| | | | | CACCGUG |
| | | | | [SEQ ID NO: 447] |
| AGCGUUAGGGUGCGCAUACUGC | XD-14904 | miR-1-1 | Atxn2 | CAUGCAGACUGCCUGCUUGGGGGAGUAUGCGCACCCUAAGAGC |
| [SEQ ID NO: 336] | | | targeting | UUAUGGACCUGCUAAGCUAAGCGUUAGGGUGCGCAUACUGCCU |
| | | | | CAGGCCGGGACCUCUCUCGCCGCACUGAGGGGCACUCCACACC |
| | | | | ACGGGGGCC |
| | | | | [SEQ ID NO: 448] |
| AGGAACGUGGGUUGAACUCCUU | XD-14857 | miR-155E | Atxn2 | CUGGAGGCUUGCUUUGGGCUGUAUGCUGAGGAACGUGGGUUGA |
| [SEQ ID NO: 242] | | | targeting | ACUCCUUUUUUGGCCUCUGACUGAAAGGAGUUAACCACGUUCC |
| | | | | UCAGGACAAGGCCCUUUAUCAGCACUCACAUGGAACAAAUGGC |
| | | | | CACCGUG |
| | | | | [SEQ ID NO: 449] |
| AGGAACGUGGGUUGAACUCCUU | XD-14857 | miR-1-1 | Atxn2 | CAUGCAGACUGCCUGCUUGGGAUGGAGUUCAACCCACGUCGCC |
| [SEQ ID NO: 242] | | | targeting | UUAUGGACCUGCUAAGCUAAGGAACGUGGGUUGAACUCCUUCU |
| | | | | CAGGCCGGGACCUCUCUCGCCGCACUGAGGGGCACUCCACACC |
| | | | | ACGGGGGCC |
| | | | | [SEQ ID NO: 450] |
| AUAAUAAUCCGUCAGUUUGACG | XD-14949 | miR-155E | Atxn2 | CUGGAGGCUUGCUUUGGGCUGUAUGCUGAUAAUAAUCCGUCAG |
| [SEQ ID NO: 426] | | | targeting | UUUGACGUUUUGGCCUCUGACUGACGUCAAACGACGAUUAUUA |
| | | | | UCAGGACAAGGCCCUUUAUCAGCACUCACAUGGAACAAAUGGC |
| | | | | CACCGUG |
| | | | | [SEQ ID NO: 451] |
| AUAAUAAUCCGUCAGUUUGACG | XD-14949 | miR-1-1 | Atxn2 | CAUGCAGACUGCCUGCUUGGGCCUCAAACUGACGGAUUACGUA |
| [SEQ ID NO: 426] | | | targeting | UUAUGGACCUGCUAAGCUAAUAAUAAUCCGUCAGUUUGACGCU |
| | | | | CAGGCCGGGACCUCUCUCGCCGCACUGAGGGGCACUCCACACC |
| | | | | ACGGGGGCC |
| | | | | [SEQ ID NO: 452] |
| AUACGCGGUGAAUUCUGUCUCC | XD-14787 | miR-155E | Atxn2 | CUGGAGGCUUGCUUUGGGCUGUAUGCUGAUACGCGGUGAAUUC |
| [SEQ ID NO: 102] | | | targeting | UGUCUCCUUUUGGCCUCUGACUGAGGAGACAGAUUACCGCGUA |
| | | | | UCAGGACAAGGCCCUUUAUCAGCACUCACAUGGAACAAAUGGC |
| | | | | CACCGUG |
| | | | | [SEQ ID NO: 453] |
| AUACGCGGUGAAUUCUGUCUCC | XD-14787 | miR-1-1 | Atxn2 | CAUGCAGACUGCCUGCUUGGGGCAGACAGAAUUCACCGCCUUA |
| [SEQ ID NO: 102] | | | targeting | UUAUGGACCUGCUAAGCUAAUACGCGGUGAAUUCUGUCUCCCU |
| | | | | CAGGCCGGGACCUCUCUCGCCGCACUGAGGGGCACUCCACACC |
| | | | | ACGGGGGCC |
| | | | | [SEQ ID NO: 454] |
| AUUAACUACUCUUUGGUCUGAA | XD-14792 | miR-1-1 | Atxn2 | CAUGCAGACUGCCUGCUUGGGUACAGACCAAAGAGUAGUCGAA |
| [SEQ ID NO: 112] | | | targeting | UUAUGGACCUGCUAAGCUAAUUAACUACUCUUUGGUCUGAACU |
| | | | | CAGGCCGGGACCUCUCUCGCCGCACUGAGGGGCACUCCACACC |
| | | | | ACGGGGGCC |
| | | | | [SEQ ID NO: 455] |
| AUUAACUACUCUUUGGUCUGAA | XD-14792 | miR-155E | Atxn2 | CUGGAGGCUUGCUUUGGGCUGUAUGCUGAUUAACUACUCUUUG |
| [SEQ ID NO: 112] | | | targeting | GUCUGAAUUUUGGCCUCUGACUGAUUCAGACCAAGGUAGUUAA |
| | | | | UCAGGACAAGGCCCUUUAUCAGCACUCACAUGGAACAAAUGGC |
| | | | | CACCGUG |
| | | | | [SEQ ID NO: 456] |
| AUUGCGUGGAGUAAGCUGGUGG | XD-14889 | miR-155E | Atxn2 | CUGGAGGCUUGCUUUGGGCUGUAUGCUGAUUGCGUGGAGUAAG |
| [SEQ ID NO: 306] | | | targeting | CUGGUGGUUUUGGCCUCUGACUGACCACCAGCUACCCACGCAA |
| | | | | UCAGGACAAGGCCCUUUAUCAGCACUCACAUGGAACAAAUGGC |
| | | | | CACCGUG |
| | | | | [SEQ ID NO: 457] |
| AUUGCGUGGAGUAAGCUGGUGG | XD-14889 | miR-1-1 | Atxn2 | CAUGCAGACUGCCUGCUUGGGCGACCAGCUUACUCCACGGAAA |
| [SEQ ID NO: 306] | | | targeting | UUAUGGACCUGCUAAGCUAAUUGCGUGGAGUAAGCUGGUGGCU |
| | | | | CAGGCCGGGACCUCUCUCGCCGCACUGAGGGGCACUCCACACC |
| | | | | ACGGGGGCC |
| | | | | [SEQ ID NO: 458] |
| AUUUCGAGGAUGUCGCUGGGCC | XD-14798 | miR-155E | Atxn2 | CUGGAGGCUUGCUUUGGGCUGUAUGCUGAUUUCGAGGAUGUCG |
| [SEQ ID NO: 124] | | | targeting | CUGGGCCUUUUGGCCUCUGACUGAGGCCCAGCACACCUCGAAA |
| | | | | UCAGGACAAGGCCCUUUAUCAGCACUCACAUGGAACAAAUGGC |
| | | | | CACCGUG |
| | | | | [SEQ ID NO: 459] |
| AUUUCGAGGAUGUCGCUGGGCC | XD-14798 | miR-1-1 | Atxn2 | CAUGCAGACUGCCUGCUUGGGGCCCCAGCGACAUCCUCGCCAA |
| [SEQ ID NO: 124] | | | targeting | UUAUGGACCUGCUAAGCUAAUUUCGAGGAUGUCGCUGGGCCCU |
| | | | | CAGGCCGGGACCUCUCUCGCCGCACUGAGGGGCACUCCACACC |
| | | | | ACGGGGGCC |
| | | | | [SEQ ID NO: 460] |
| UAAAUCGUAGACUGAGGCAGUC | XD-14742 | miR-1-1 | Atxn2 | CAUGCAGACUGCCUGCUUGGGGUCUGCCUCAGUCUACGACGUU |
| [SEQ ID NO: 12] | | | targeting | AUAUGGACCUGCUAAGCUAUAAAUCGUAGACUGAGGCAGUCCU |
| | | | | CAGGCCGGGACCUCUCUCGCCGCACUGAGGGGCACUCCACACC |
| | | | | ACGGGGGCC |
| | | | | [SEQ ID NO: 461] |
| UAAAUCGUAGACUGAGGCAGUC | XD-14742 | miR-155E | Atxn2 | CUGGAGGCUUGCUUUGGGCUGUAUGCUGUAAAUCGUAGACUGA |
| [SEQ ID NO: 12] | | | targeting | GGCAGUCUUUUGGCCUCUGACUGAGACUGCCUAGUUACGAUUU |
| | | | | ACAGGACAAGGCCCUUUAUCAGCACUCACAUGGAACAAAUGGC |
| | | | | CACCGUG |
| | | | | [SEQ ID NO: 462] |
| UACGCGGUGAAUUCUGUCUCCC | XD-14786 | miR-1-1 | Atxn2 | CAUGCAGACUGCCUGCUUGGGGCGAGACAGAAUUCACCGGAGU |
| [SEQ ID NO: 100] | | | targeting | AUAUGGACCUGCUAAGCUAUACGCGGUGAAUUCUGUCUCCCCU |
| | | | | CAGGCCGGGACCUCUCUCGCCGCACUGAGGGGCACUCCACACC |
| | | | | ACGGGGGCC |
| | | | | [SEQ ID NO: 463] |
| UACGCGGUGAAUUCUGUCUCCC | XD-14786 | miR-155E | Atxn2 | CUGGAGGCUUGCUUUGGGCUGUAUGCUGUACGCGGUGAAUUCU |
| [SEQ ID NO: 100] | | | targeting | GUCUCCCUUUUGGCCUCUGACUGAGGGAGACAAAUCACCGCGU |
| | | | | ACAGGACAAGGCCCUUUAUCAGCACUCACAUGGAACAAAUGGC |
| | | | | CACCGUG |
| | | | | [SEQ ID NO: 464] |
| UAUACGCGGUGAAUUCUGUCUC | XD-14788 | miR-1-1 | Atxn2 | CAUGCAGACUGCCUGCUUGGGGUGACAGAAUUCACCGCGCGAU |
| [SEQ ID NO: 104] | | | targeting | AUAUGGACCUGCUAAGCUAUAUACGCGGUGAAUUCUGUCUCCU |
| | | | | CAGGCCGGGACCUCUCUCGCCGCACUGAGGGGCACUCCACACC |
| | | | | ACGGGGGCC |
| | | | | [SEQ ID NO: 465] |
| UAUACGCGGUGAAUUCUGUCUC | XD-14788 | miR-155E | Atxn2 | CUGGAGGCUUGCUUUGGGCUGUAUGCUGUAUACGCGGUGAAUU |
| [SEQ ID NO: 104] | | | targeting | CUGUCUCUUUUGGCCUCUGACUGAGAGACAGAUUCCCGCGUAU |
| | | | | ACAGGACAAGGCCCUUUAUCAGCACUCACAUGGAACAAAUGGC |
| | | | | CACCGUG |
| | | | | [SEQ ID NO: 466] |
| UAUUGCGUGGAGUAAGCUGGUG | XD-14890 | miR-1-1 | Atxn2 | CAUGCAGACUGCCUGCUUGGGCUCCAGCUUACUCCACGCCCAU |
| [SEQ ID NO: 308] | | | targeting | AUAUGGACCUGCUAAGCUAUAUUGCGUGGAGUAAGCUGGUGCU |
| | | | | CAGGCCGGGACCUCUCUCGCCGCACUGAGGGGCACUCCACACC |
| | | | | ACGGGGGCC |
| | | | | [SEQ ID NO: 467] |
| UAUUGCGUGGAGUAAGCUGGUG | XD-14890 | miR-155E | Atxn2 | CUGGAGGCUUGCUUUGGGCUGUAUGCUGUAUUGCGUGGAGUAA |
| [SEQ ID NO: 308] | | | targeting | GCUGGUGUUUUGGCCUCUGACUGACACCAGCUACUCACGCAAU |
| | | | | ACAGGACAAGGCCCUUUAUCAGCACUCACAUGGAACAAAUGGC |
| | | | | CACCGUG |
| | | | | [SEQ ID NO: 468] |
| UAUUUCGAGGAUGUCGCUGGGC | XD-14799 | miR-155E | Atxn2 | CUGGAGGCUUGCUUUGGGCUGUAUGCUGUAUUUCGAGGAUGUC |
| [SEQ ID NO: 126] | | | targeting | GCUGGGCUUUUGGCCUCUGACUGAGCCCAGCGCAUCUCGAAAU |
| | | | | ACAGGACAAGGCCCUUUAUCAGCACUCACAUGGAACAAAUGGC |
| | | | | CACCGUG |
| | | | | [SEQ ID NO: 469] |
| UAUUUCGAGGAUGUCGCUGGGC | XD-14799 | miR-1-1 | Atxn2 | CAUGCAGACUGCCUGCUUGGGGGCCAGCGACAUCCUCGACCAU |
| [SEQ ID NO: 126] | | | targeting | AUAUGGACCUGCUAAGCUAUAUUUCGAGGAUGUCGCUGGGCCU |
| | | | | CAGGCCGGGACCUCUCUCGCCGCACUGAGGGGCACUCCACACC |
| | | | | ACGGGGGCC |
| | | | | [SEQ ID NO: 470] |
| UCGCUGUUGGGGCAUAUUUGGU | XD-14887 | miR-1-1 | Atxn2 | CAUGCAGACUGCCUGCUUGGGAGCAAAUAUGCCCCAACACUCG |
| [SEQ ID NO: 302] | | | targeting | AUAUGGACCUGCUAAGCUAUCGCUGUUGGGGCAUAUUUGGUCU |
| | | | | CAGGCCGGGACCUCUCUCGCCGCACUGAGGGGCACUCCACACC |
| | | | | ACGGGGGCC |
| | | | | [SEQ ID NO: 471] |
| UCGCUGUUGGGGCAUAUUUGGU | XD-14887 | miR-155E | Atxn2 | CUGGAGGCUUGCUUUGGGCUGUAUGCUGUCGCUGUUGGGGCAU |
| [SEQ ID NO: 302] | | | targeting | AUUUGGUUUUUGGCCUCUGACUGAACCAAAUAGCCCAACAGCG |
| | | | | ACAGGACAAGGCCCUUUAUCAGCACUCACAUGGAACAAAUGGC |
| | | | | CACCGUG |
| | | | | [SEQ ID NO: 472] |
| UGCGCAUACUGCUGAGCAAGGG | XD-14901 | miR-1-1 | Atxn2 | CAUGCAGACUGCCUGCUUGGGCGCUUGCUCAGCAGUAUGGAGC |
| [SEQ ID NO: 330] | | | targeting | AUAUGGACCUGCUAAGCUAUGCGCAUACUGCUGAGCAAGGGCU |
| | | | | CAGGCCGGGACCUCUCUCGCCGCACUGAGGGGCACUCCACACC |
| | | | | ACGGGGGCC |
| | | | | [SEQ ID NO: 473] |
| UGCGCAUACUGCUGAGCAAGGG | XD-14901 | miR-155E | Atxn2 | CUGGAGGCUUGCUUUGGGCUGUAUGCUGUGCGCAUACUGCUGA |
| [SEQ ID NO: 330] | | | targeting | GCAAGGGUUUUGGCCUCUGACUGACCCUUGCUAGCGUAUGCGC |
| | | | | ACAGGACAAGGCCCUUUAUCAGCACUCACAUGGAACAAAUGGC |
| | | | | CACCGUG |
| | | | | [SEQ ID NO: 474] |
| UGUACCACAACAAAGUCUGAAC | XD-14756 | miR-1-1 | Atxn2 | CAUGCAGACUGCCUGCUUGGGGAUCAGACUUUGUUGUGGCGAC |
| [SEQ ID NO: 40] | | | targeting | AUAUGGACCUGCUAAGCUAUGUACCACAACAAAGUCUGAACCU |
| | | | | CAGGCCGGGACCUCUCUCGCCGCACUGAGGGGCACUCCACACC |
| | | | | ACGGGGGCC |
| | | | | [SEQ ID NO: 475] |
| UGUACCACAACAAAGUCUGAAC | XD-14756 | miR-155E | Atxn2 | CUGGAGGCUUGCUUUGGGCUGUAUGCUGUGUACCACAACAAAG |
| [SEQ ID NO: 40] | | | targeting | UCUGAACUUUUGGCCUCUGACUGAGUUCAGACUUGUGUGGUAC |
| | | | | ACAGGACAAGGCCCUUUAUCAGCACUCACAUGGAACAAAUGGC |
| | | | | CACCGUG |
| | | | | [SEQ ID NO: 476] |
| UGUAUACGCCGGCUGAACGUGA | XD-14917 | miR-1-1 | Atxn2 | CAUGCAGACUGCCUGCUUGGGUGACGUUCAGCCGGCGUACGAC |
| [SEQ ID NO: 362] | | | targeting | AUAUGGACCUGCUAAGCUAUGUAUACGCCGGCUGAACGUGACU |
| | | | | CAGGCCGGGACCUCUCUCGCCGCACUGAGGGGCACUCCACACC |
| | | | | ACGGGGGCC |
| | | | | [SEQ ID NO: 477] |
| UGUAUACGCCGGCUGAACGUGA | XD-14917 | miR-155E | Atxn2 | CUGGAGGCUUGCUUUGGGCUGUAUGCUGUGUAUACGCCGGCUG |
| [SEQ ID NO: 362] | | | targeting | AACGUGAUUUUGGCCUCUGACUGAUCACGUUCGCCGCGUAUAC |
| | | | | ACAGGACAAGGCCCUUUAUCAGCACUCACAUGGAACAAAUGGC |
| | | | | CACCGUG |
| | | | | [SEQ ID NO: 478] |
| UUACUAAGUAUUGAAGGGGAAA | XD-14846 | miR-155E | Atxn2 | CUGGAGGCUUGCUUUGGGCUGUAUGCUGUUACUAAGUAUUGAA |
| [SEQ ID NO: 220] | | | targeting | GGGGAAAUUUUGGCCUCUGACUGAUUUCCCCUCAAACUUAGUA |
| | | | | ACAGGACAAGGCCCUUUAUCAGCACUCACAUGGAACAAAUGGC |
| | | | | CACCGUG |
| | | | | [SEQ ID NO: 479] |
| UUACUAAGUAUUGAAGGGGAAA | XD-14846 | miR-1-1 | Atxn2 | CAUGCAGACUGCCUGCUUGGGUAUCCCCUUCAAUACUUACUUA |
| [SEQ ID NO: 220] | | | targeting | AUAUGGACCUGCUAAGCUAUUACUAAGUAUUGAAGGGGAAACU |
| | | | | CAGGCCGGGACCUCUCUCGCCGCACUGAGGGGCACUCCACACC |
| | | | | ACGGGGGCC |
| | | | | [SEQ ID NO: 480] |
| UUAGUUGAUCCAUAGAUUCAGA | XD-14835 | miR-1-1 | Atxn2 | CAUGCAGACUGCCUGCUUGGGUGUGAAUCUAUGGAUCAAGAUA |
| [SEQ ID NO: 198] | | | targeting | AUAUGGACCUGCUAAGCUAUUAGUUGAUCCAUAGAUUCAGACU |
| | | | | CAGGCCGGGACCUCUCUCGCCGCACUGAGGGGCACUCCACACC |
| | | | | ACGGGGGCC |
| | | | | [SEQ ID NO: 481] |
| UUAGUUGAUCCAUAGAUUCAGA | XD-14835 | miR-155E | Atxn2 | CUGGAGGCUUGCUUUGGGCUGUAUGCUGUUAGUUGAUCCAUAG |
| [SEQ ID NO: 198] | | | targeting | AUUCAGAUUUUGGCCUCUGACUGAUCUGAAUCAUGAUCAACUA |
| | | | | ACAGGACAAGGCCCUUUAUCAGCACUCACAUGGAACAAAUGGC |
| | | | | CACCGUG |
| | | | | [SEQ ID NO: 482] |
| UUCGAUGCAGGACUAGCAGGCG | XD-14819 | miR-155E | Atxn2 | CUGGAGGCUUGCUUUGGGCUGUAUGCUGUUCGAUGCAGGACUA |
| [SEQ ID NO: 166] | | | targeting | GCAGGCGUUUUGGCCUCUGACUGACGCCUGCUGUCUGCAUCGA |
| | | | | ACAGGACAAGGCCCUUUAUCAGCACUCACAUGGAACAAAUGGC |
| | | | | CACCGUG |
| | | | | [SEQ ID NO: 483] |
| UUCGAUGCAGGACUAGCAGGCG | XD-14819 | miR-1-1 | Atxn2 | CAUGCAGACUGCCUGCUUGGGCCCCUGCUAGUCCUGCAUGAGA |
| [SEQ ID NO: 166] | | | targeting | AUAUGGACCUGCUAAGCUAUUCGAUGCAGGACUAGCAGGCGCU |
| | | | | CAGGCCGGGACCUCUCUCGCCGCACUGAGGGGCACUCCACACC |
| | | | | ACGGGGGCC |
| | | | | [SEQ ID NO: 484] |
| UUCGGGUUGAAAUCUGAAGUGU | XD-14790 | miR-155E | Atxn2 | CUGGAGGCUUGCUUUGGGCUGUAUGCUGUUCGGGUUGAAAUCU |
| [SEQ ID NO: 108] | | | targeting | GAAGUGUUUUUGGCCUCUGACUGAACACUUCAAUUCAACCCGA |
| | | | | ACAGGACAAGGCCCUUUAUCAGCACUCACAUGGAACAAAUGGC |
| | | | | CACCGUG |
| | | | | [SEQ ID NO: 485] |
| UUCGGGUUGAAAUCUGAAGUGU | XD-14790 | miR-1-1 | Atxn2 | CAUGCAGACUGCCUGCUUGGGAGACUUCAGAUUUCAACCGAGA |
| [SEQ ID NO: 108] | | | targeting | AUAUGGACCUGCUAAGCUAUUCGGGUUGAAAUCUGAAGUGUCU |
| | | | | CAGGCCGGGACCUCUCUCGCCGCACUGAGGGGCACUCCACACC |
| | | | | ACGGGGGCC |
| | | | | [SEQ ID NO: 486] |
| UUGAUUUCGAGGAUGUCGCUGG | XD-14800 | miR-1-1 | Atxn2 | CAUGCAGACUGCCUGCUUGGGCGAGCGACAUCCUCGAAACGCA |
| [SEQ ID NO: 128] | | | targeting | AUAUGGACCUGCUAAGCUAUUGAUUUCGAGGAUGUCGCUGGCU |
| | | | | CAGGCCGGGACCUCUCUCGCCGCACUGAGGGGCACUCCACACC |
| | | | | ACGGGGGCC |
| | | | | [SEQ ID NO: 487] |
| UUGAUUUCGAGGAUGUCGCUGG | XD-14800 | miR-155E | Atxn2 | CUGGAGGCUUGCUUUGGGCUGUAUGCUGUUGAUUUCGAGGAUG |
| [SEQ ID NO: 128] | | | targeting | UCGCUGGUUUUGGCCUCUGACUGACCAGCGACUCCCGAAAUCA |
| | | | | ACAGGACAAGGCCCUUUAUCAGCACUCACAUGGAACAAAUGGC |
| | | | | CACCGUG |
| | | | | [SEQ ID NO: 488] |
| UUGUACUGGGCACUUGACUCAA | XD-14781 | miR-155E | Atxn2 | CUGGAGGCUUGCUUUGGGCUGUAUGCUGUUGUACUGGGCACUU |
| [SEQ ID NO: 90] | | | targeting | GACUCAAUUUUGGCCUCUGACUGAUUGAGUCAGUGCCAGUACA |
| | | | | ACAGGACAAGGCCCUUUAUCAGCACUCACAUGGAACAAAUGGC |
| | | | | CACCGUG |
| | | | | [SEQ ID NO: 489] |
| UUGUACUGGGCACUUGACUCAA | XD-14781 | miR-1-1 | Atxn2 | CAUGCAGACUGCCUGCUUGGGUAGAGUCAAGUGCCCAGUCCCA |
| [SEQ ID NO: 90] | | | targeting | AUAUGGACCUGCUAAGCUAUUGUACUGGGCACUUGACUCAACU |
| | | | | CAGGCCGGGACCUCUCUCGCCGCACUGAGGGGCACUCCACACC |
| | | | | ACGGGGGCC |
| | | | | [SEQ ID NO: 490] |

[0172] In some embodiments, an artificial miRNA comprises or consists of a nucleic acid sequence set forth in Table 3. In some embodiments, an artificial miRNA comprises or consists of a nucleic acid sequence of any one of SEQ ID NOS:443-490.

[0173] In some embodiments, an artificial miRNA comprises or consists of a nucleic acid sequence set forth in Table 9. In some embodiments, an artificial miRNA comprises or consists of a nucleic acid sequence of any one of SEQ ID NOS:1109-1111, and 1114.

[0174] In some embodiments, an artificial miRNA comprises or consists of a nucleic acid sequence set forth in Table 11. In some embodiments, an artificial miRNA comprises or consists of a nucleic acid sequence of any one of SEQ ID NOS:1121-1168.

[0175] In some embodiments, an artificial miRNA comprises or consists of a nucleic acid sequence set forth in Table 19. In some embodiments, an artificial miRNA comprises or consists of a nucleic acid sequence of any one of SEQ ID NOS:1405-1520.

[0176] In some embodiments, an artificial miRNA comprises or consists of a nucleic acid sequence set forth in Table 23. In some embodiments, an artificial miRNA comprises or consists of a nucleic acid sequence of any one of SEQ ID NOS:1908-2007.

[0177] In some embodiments, an artificial miRNA comprises or consists of a nucleic acid sequence set forth in Table 24. In some embodiments, an artificial miRNA comprises or consists of a nucleic acid sequence of any one of SEQ ID NOS:1908-1934, 1936-1977, 1979-1982, 1984-1994, 1997, 1998, 2000, 2001, 2005-2007, 2011, 2017, 2021, 2025, 2027, 2031, 2035, 2039, 2041, 2045, 2049, 2053, 2057, 2061, 2067, 2071, 2075, 2079, 2085, 2089, 2093, 2097, 2101, 2105, 2109, 2113, 2117, 2120, 2124, 2128, 2132, 2136, 2140, 2144, 2148, 2154, 2158, 2162, 2166, 2170, 2174, 2176, 2180, 2182, 2184, 2187, 2189, 2191, 2193, 2195, 2197, 2199, 2205, 2211, 2261, 2263, 2265, and 2267.

[0178] In some embodiments, an artificial miRNA comprises or consists of a nucleic acid sequence set forth in Table 25. In some embodiments, an artificial miRNA comprises or consists of a nucleic acid sequence of any one of SEQ ID NOS:1915, 1982, 1965, 1937, 1985, 1921, and 2021.

### Expression Constructs

[0179] In another aspect, the present disclosure provides an isolated nucleic acid comprising an expression construct or expression cassette encoding any one of the inhibitory nucleic acids (e.g., siRNA, shRNA, dsRNA, miRNA, amiRNA, etc.) that inhibit the expression or activity of ATXN2 as described herein.

[0180] In some embodiments, the isolated nucleic acid comprises an expression construct encoding an inhibitory nucleic acid that inhibits the expression or activity of ATXN2, wherein the inhibitory nucleic acid comprises a guide strand sequence comprising or consisting of the nucleic acid sequence set forth in any one of the guide sequences of Tables 1, 3, 9, 11, 12, 13, 19, 23, 24, and 25, e.g., SEQ ID NOS: 4, 6, 8, 10, 12, 14, 16, 18, 20, 22, 24, 26, 28, 30, 32, 34, 36, 38, 40, 42, 44, 46, 48, 50, 52, 54, 56, 58, 60, 62, 64, 66, 68, 70, 72, 74, 76, 78, 80, 82, 84, 86, 88, 90, 92, 94, 96, 98, 100, 102, 104, 106, 108, 110, 112, 114, 116, 118, 120, 124, 126, 128, 130, 132, 134, 136, 138, 140, 142, 144, 146, 148, 150, 152, 154, 156, 158, 160, 162, 164, 166, 168, 170, 172, 174, 176, 178, 180, 182, 184, 186, 188, 190, 192, 194, 196, 198, 200, 202, 204, 206, 208, 210, 212, 214, 216, 218, 220, 222, 224, 226, 228, 230, 232, 234, 236, 238, 240, 242, 244, 246, 248, 250, 252, 254, 256, 258, 260, 262, 264, 266, 268, 270, 272, 274, 276, 278, 280, 282, 284, 286, 288, 290, 292, 294, 296, 298, 300, 302, 304, 306, 308, 310, 312, 314, 316, 318, 320, 324, 326, 328, 330, 332, 334, 336, 338, 340, 342, 344, 346, 348, 350, 352, 354, 356, 358, 360, 362, 364, 366, 368, 370, 372, 374, 376, 378, 380, 382, 384, 386, 388, 390, 392, 394, 396, 398, 400, 402, 404, 406, 408, 410, 412, 414, 416, 418, 420, 422, 424, 426, 428, 430, 432, 434, 436, 1176-1288, 1811-1827, 2015, 2065, 2083, 2152, 2203, and 2209.

[0181] In some embodiments, the isolated nucleic acid comprises an expression construct encoding an inhibitory nucleic acid that inhibits the expression or activity of ATXN2, wherein the inhibitory nucleic acid comprises a guide strand sequence comprising or consisting of the nucleic acid sequence set forth in any one of the guide sequences of Tables 1, 3, 9, 11, 12, 13, 19, 23, 24, and 25, e.g., SEQ ID NOS: 4, 6, 8, 10, 12, 14, 16, 18, 20, 22, 24, 26, 28, 30, 32, 34, 36, 38, 40, 42, 44, 46, 48, 50, 52, 54, 56, 58, 60, 62, 64, 66, 68, 70, 72, 74, 76, 78, 80, 82, 84, 86, 88, 90, 92, 94, 96, 98, 100, 102, 104, 106, 108, 110, 112, 114, 116, 118, 120, 124, 126, 128, 130, 132, 134, 136, 138, 140, 142, 144, 146, 148, 150, 152, 154, 156, 158, 160, 162, 164, 166, 168, 170, 172, 174, 176, 178, 180, 182, 184, 186, 188, 190, 192, 194, 196, 198, 200, 202, 204, 206, 208, 210, 212, 214, 216, 218, 220, 222, 224, 226, 228, 230, 232, 234, 236, 238, 240, 242, 244, 246, 248, 250, 252, 254, 256, 258, 260, 262, 264, 266, 268, 270, 272, 274, 276, 278, 280, 282, 284, 286, 288, 290, 292, 294, 296, 298, 300, 302, 304, 306, 308, 310, 312, 314, 316, 318, 320, 324, 326, 328, 330, 332, 334, 336, 338, 340, 342, 344, 346, 348, 350, 352, 354, 356, 358, 360, 362, 364, 366, 368, 370, 372, 374, 376, 378, 380, 382, 384, 386, 388, 390, 392, 394, 396, 398, 400, 402, 404, 406, 408, 410, 412, 414, 416, 418, 420, 422, 424, 426, 428, 430, 432, 434, 436, 1176-1288, 1811-1827, 2015, 2065, 2083, 2152, 2203, and 2209, with at least 1, 2, 3, 4, or 5 mismatches to the target ATXN2 mRNA sequence.

[0182] In some embodiments, the isolated nucleic acid comprises an expression construct encoding an inhibitory nucleic acid that inhibits the expression or activity of ATXN2, wherein the inhibitory nucleic acid comprises a guide strand sequence comprising or consisting of a sequence at least 60%, 70%, 75%, 80%, 85%, 90%, 95%, 97%, 99%, or 100% identical to any one of the guide sequences of Tables 1, 3, 9, 11, 12, 13, 19, 23, 24, and 25, e.g., SEQ ID NOS: 4, 6, 8, 10, 12, 14, 16, 18, 20, 22, 24, 26, 28, 30, 32, 34, 36, 38, 40, 42, 44, 46, 48, 50, 52, 54, 56, 58, 60, 62, 64, 66, 68, 70, 72, 74, 76, 78, 80, 82, 84, 86, 88, 90, 92, 94, 96, 98, 100, 102, 104, 106, 108, 110, 112, 114, 116, 118, 120, 124, 126, 128, 130, 132, 134, 136, 138, 140, 142, 144, 146, 148, 150, 152, 154, 156, 158, 160, 162, 164, 166, 168, 170, 172, 174, 176, 178, 180, 182, 184, 186, 188, 190, 192, 194, 196, 198, 200, 202, 204, 206, 208, 210, 212, 214, 216, 218, 220, 222, 224, 226, 228, 230, 232, 234, 236, 238, 240, 242, 244, 246, 248, 250, 252, 254, 256, 258, 260, 262, 264, 266, 268, 270, 272, 274, 276, 278, 280, 282, 284, 286, 288, 290, 292, 294, 296, 298, 300, 302, 304, 306, 308, 310, 312, 314, 316, 318, 320, 324, 326, 328, 330, 332, 334, 336, 338, 340, 342, 344, 346, 348, 350, 352, 354, 356, 358, 360, 362, 364, 366, 368, 370, 372, 374, 376, 378, 380, 382, 384, 386, 388, 390, 392, 394, 396, 398, 400, 402, 404, 406, 408, 410, 412, 414, 416, 418, 420, 422, 424, 426, 428, 430, 432, 434, 436, 1176-1288, 1811-1827, 2015, 2065, 2083, 2152, 2203, and 2209.

[0183] In some embodiments, the isolated nucleic acid comprises an expression construct encoding an inhibitory nucleic acid that inhibits the expression or activity of ATXN2, wherein the inhibitory nucleic acid comprises a guide strand sequence comprising or consisting of at least 15, 16, 17, 18, 19, 20, 21, or 22 contiguous nucleotides of a sequence of any one of the guide sequences of Tables 1, 3, 9, 11, 12, 13, 19, 23, 24, and 25 e.g., SEQ ID NOS: 4, 6, 8, 10, 12, 14, 16, 18, 20, 22, 24, 26, 28, 30, 32, 34, 36, 38, 40, 42, 44, 46, 48, 50, 52, 54, 56, 58, 60, 62, 64, 66, 68, 70, 72, 74, 76, 78, 80, 82, 84, 86, 88, 90, 92, 94, 96, 98, 100, 102, 104, 106, 108, 110, 112, 114, 116, 118, 120, 124, 126, 128, 130, 132, 134, 136, 138, 140, 142, 144, 146, 148, 150, 152, 154, 156, 158, 160, 162, 164, 166, 168, 170, 172, 174, 176, 178, 180, 182, 184, 186, 188, 190, 192, 194, 196, 198, 200, 202, 204, 206, 208, 210, 212, 214, 216, 218, 220, 222, 224, 226, 228, 230, 232, 234, 236, 238, 240, 242, 244, 246, 248, 250, 252, 254, 256, 258, 260, 262, 264, 266, 268, 270, 272, 274, 276, 278, 280, 282, 284, 286, 288, 290, 292, 294, 296, 298, 300, 302, 304, 306, 308, 310, 312, 314, 316, 318, 320, 324, 326, 328, 330, 332, 334, 336, 338, 340, 342, 344, 346, 348, 350, 352, 354, 356, 358, 360, 362, 364, 366, 368, 370, 372, 374, 376, 378, 380, 382, 384, 386, 388, 390, 392, 394, 396, 398, 400, 402, 404, 406, 408, 410, 412, 414, 416, 418, 420, 422, 424, 426, 428, 430, 432, 434, 436, 1176-1288, 1811-1827, 2015, 2065, 2083, 2152, 2203, and 2209, preferably wherein the guide strand sequence retains positions 2-7 (“seed sequence”) of the selected SEQ ID NO.

[0184] In some embodiments, the isolated nucleic acid comprises an expression construct encoding an inhibitory nucleic acid that inhibits the expression or activity of ATXN2, wherein the inhibitory nucleic acid comprises a guide strand sequence comprising or consisting of a sequence of any one of the guide sequences of Tables 1, 3, 9, 11, 12, 13, 19, 23, 24, and 25, e.g., SEQ ID NOS: 4, 6, 8, 10, 12, 14, 16, 18, 20, 22, 24, 26, 28, 30, 32, 34, 36, 38, 40, 42, 44, 46, 48, 50, 52, 54, 56, 58, 60, 62, 64, 66, 68, 70, 72, 74, 76, 78, 80, 82, 84, 86, 88, 90, 92, 94, 96, 98, 100, 102, 104, 106, 108, 110, 112, 114, 116, 118, 120, 124, 126, 128, 130, 132, 134, 136, 138, 140, 142, 144, 146, 148, 150, 152, 154, 156, 158, 160, 162, 164, 166, 168, 170, 172, 174, 176, 178, 180, 182, 184, 186, 188, 190, 192, 194, 196, 198, 200, 202, 204, 206, 208, 210, 212, 214, 216, 218, 220, 222, 224, 226, 228, 230, 232, 234, 236, 238, 240, 242, 244, 246, 248, 250, 252, 254, 256, 258, 260, 262, 264, 266, 268, 270, 272, 274, 276, 278, 280, 282, 284, 286, 288, 290, 292, 294, 296, 298, 300, 302, 304, 306, 308, 310, 312, 314, 316, 318, 320, 324, 326, 328, 330, 332, 334, 336, 338, 340, 342, 344, 346, 348, 350, 352, 354, 356, 358, 360, 362, 364, 366, 368, 370, 372, 374, 376, 378, 380, 382, 384, 386, 388, 390, 392, 394, 396, 398, 400, 402, 404, 406, 408, 410, 412, 414, 416, 418, 420, 422, 424, 426, 428, 430, 432, 434, 436, 1176-1288, 1811-1827, 2015, 2065, 2083, 2152, 2203, and 2209, wherein 1, 2, 3, or 4 nucleotides at positions 19-22 differ from the selected SEQ ID NO (variant nucleotide(s)) such that the guide strand sequence is no longer complementary to the ATXN2 target sequence at the variant nucleotide(s).

[0185] In some embodiments, the isolated nucleic acid molecule comprises an expression construct encoding an inhibitory nucleic acid that inhibits the expression or activity of ATXN2, wherein the inhibitory nucleic acid comprises a guide strand sequence of Table 12. In some embodiments, the inhibitory nucleic acid comprises a guide strand sequence comprising or consisting of the nucleic acid sequence set forth in any one of SEQ ID NOS: 12, 14, 40, 60, 100, 104, 108, 112, 124, 126, 128, 166, 198, 220, 242, 302, 306, 308, 330, 336, and 362. In some embodiments, the isolated nucleic acid comprises an expression construct encoding an inhibitory nucleic acid that inhibits the expression or activity of ATXN2, wherein the inhibitory nucleic acid comprises a guide strand sequence comprising or consisting of the nucleic acid sequence set forth in any one of SEQ ID NOS: 12, 14, 40, 60, 100, 104, 108, 112, 124, 126, 128, 166, 198, 220, 242, 302, 306, 308, 330, 336, and 362 with at least 1, 2, 3, 4, or 5 mismatches to the target ATXN2 mRNA sequence. In some embodiments, the isolated nucleic acid comprises an expression construct encoding an inhibitory nucleic acid that inhibits the expression or activity of ATXN2, wherein the inhibitory nucleic acid comprises a guide strand sequence comprising or consisting of a nucleic acid sequence that is at least 60%, 70%, 75%, 80%, 85%, 90%, 95%, 97%, 99%, or 100% identical to any one of SEQ ID NOS: 12, 14, 40, 60, 100, 104, 108, 112, 124, 126, 128, 166, 198, 220, 242, 302, 306, 308, 330, 336, and 362. In some embodiments, the isolated nucleic acid comprises an expression construct encoding an inhibitory nucleic acid that inhibits the expression or activity of ATXN2, wherein the inhibitory nucleic acid comprises a guide strand sequence comprising or consisting of at least 15, 16, 17, 18, 19, 20, 21, or 22 contiguous nucleotides of a sequence of any one of SEQ ID NOS: 12, 14, 40, 60, 100, 104, 108, 112, 124, 126, 128, 166, 198, 220, 242, 302, 306, 308, 330, 336, and 362, preferably wherein the guide strand sequence retains positions 2-7 (“seed sequence”) of the selected SEQ ID NO. In some embodiments, the isolated nucleic acid comprises an expression construct encoding an inhibitory nucleic acid that inhibits the expression or activity of ATXN2, wherein the inhibitory nucleic acid comprises a guide strand sequence comprising or consisting of a sequence of any one of SEQ ID NOS: 12, 14, 40, 60, 100, 104, 108, 112, 124, 126, 128, 166, 198, 220, 242, 302, 306, 308, 330, 336, and 362, wherein 1, 2, 3, or 4 nucleotides at positions 19-22 differ from the selected SEQ ID NO (variant nucleotide(s)), such that the guide strand sequence is no longer complementary to the ATXN2 target sequence at the variant nucleotide(s).

[0186] In some embodiments, the isolated nucleic acid comprises an expression construct encoding an inhibitory nucleic acid that inhibits the expression or activity of ATXN2, wherein the inhibitory nucleic acid comprises a guide strand sequence of Table 13. In some embodiments, the inhibitory nucleic acid comprises a guide strand sequence comprising or consisting of the nucleic acid sequence set forth in any one of SEQ ID NOS: 14, 40, 100, 108, 112, 128, 166, 198, 242, 308, 336, and 362. In some embodiments, the isolated nucleic acid comprises an expression construct encoding an inhibitory nucleic acid that inhibits the expression or activity of ATXN2, wherein the inhibitory nucleic acid comprises a guide strand sequence comprising or consisting of the nucleic acid sequence set forth in any one of SEQ ID NOS: 14, 40, 100, 108, 112, 128, 166, 198, 242, 308, 336, and 362 with at least 1, 2, 3, 4, or 5 mismatches to the target ATXN2 mRNA sequence. In some embodiments, the isolated nucleic acid comprises an expression construct encoding an inhibitory nucleic acid that inhibits the expression or activity of ATXN2, wherein the inhibitory nucleic acid comprises a guide strand sequence comprising or consisting of a nucleic acid sequence that is at least 60%, 70%, 75%, 80%, 85%, 90%, 95%, 97%, 99%, or 100% identical to any one of SEQ ID NOS: 14, 40, 100, 108, 112, 128, 166, 198, 242, 308, 336, and 362. In some embodiments, the isolated nucleic acid comprises an expression construct encoding an inhibitory nucleic acid that inhibits the expression or activity of ATXN2, wherein the inhibitory nucleic acid comprises a guide strand sequence comprising or consisting of at least 15, 16, 17, 18, 19, 20, 21, or 22 contiguous nucleotides of a sequence of any one of SEQ ID NOS: 14, 40, 100, 108, 112, 128, 166, 198, 242, 308, 336, and 362, preferably wherein the guide strand sequence retains positions 2-7 (“seed sequence”) of the selected SEQ ID NO. In some embodiments, the isolated nucleic acid comprises an expression construct encoding an inhibitory nucleic acid that inhibits the expression or activity of ATXN2, wherein the inhibitory nucleic acid comprises a guide strand sequence comprising or consisting of a sequence of any one of SEQ ID NOS: 14, 40, 100, 108, 112, 128, 166, 198, 242, 308, 336, and 362, wherein 1, 2, 3, or 4 nucleotides at positions 19-22 differ from the selected SEQ ID NO (variant nucleotide(s)), such that the guide strand sequence is no longer complementary to the ATXN2 target sequence at the variant nucleotide(s).

[0187] In some embodiments, the isolated nucleic acid comprises an expression construct encoding an inhibitory nucleic acid that inhibits the expression or activity of ATXN2, wherein the inhibitory nucleic acid comprises a guide strand sequence of Table 19. In some embodiments, the inhibitory nucleic acid comprises a guide strand sequence comprising or consisting of the nucleic acid sequence set forth in any one of SEQ ID NOS: 1176-1288, 40, 108, and 166. In some embodiments, the isolated nucleic acid comprises an expression construct encoding an inhibitory nucleic acid that inhibits the expression or activity of ATXN2, wherein the inhibitory nucleic acid comprises a guide strand sequence comprising or consisting of the nucleic acid sequence set forth in any one of SEQ ID NOS: 1176-1288, 40, 108, and 166 with at least 1, 2, 3, 4, or 5 mismatches to the target ATXN2 mRNA sequence. In some embodiments, the isolated nucleic acid comprises an expression construct encoding an inhibitory nucleic acid that inhibits the expression or activity of ATXN2, wherein the inhibitory nucleic acid comprises a guide strand sequence comprising or consisting of a nucleic acid sequence that is at least 60%, 70%, 75%, 80%, 85%, 90%, 95%, 97%, 99%, or 100% identical to any one of SEQ ID NOS:1176-1288, 40, 108, and 166. In some embodiments, the isolated nucleic acid comprises an expression construct encoding an inhibitory nucleic acid that inhibits the expression or activity of ATXN2, wherein the inhibitory nucleic acid comprises a guide strand sequence comprising or consisting of at least 15, 16, 17, 18, 19, 20, 21, or 22 contiguous nucleotides of a sequence of any one of SEQ ID NOS:1176-1288, 40, 108, and 166, preferably wherein the guide strand sequence retains positions 2-7 (“seed sequence”) of the selected SEQ ID NO. In some embodiments, the isolated nucleic acid comprises an expression construct encoding an inhibitory nucleic acid that inhibits the expression or activity of ATXN2, wherein the inhibitory nucleic acid comprises a guide strand sequence comprising or consisting of a sequence of any one of SEQ ID NOS:1176-1288, 40, 108, and 166, wherein 1, 2, 3, or 4 nucleotides at positions 19-22 differ from the selected SEQ ID NO (variant nucleotide(s)), such that the guide strand sequence is no longer complementary to the ATXN2 target sequence at the variant nucleotide(s).

[0188] In some embodiments, the isolated nucleic acid comprises an expression construct encoding an inhibitory nucleic acid that inhibits the expression or activity of ATXN2, wherein the inhibitory nucleic acid comprises a guide strand sequence of Table 23. In some embodiments, the inhibitory nucleic acid comprises a guide strand sequence comprising or consisting of the nucleic acid sequence set forth in any one of SEQ ID NOS:1908-2007. In some embodiments, the isolated nucleic acid comprises an expression construct encoding an inhibitory nucleic acid that inhibits the expression or activity of ATXN2, wherein the inhibitory nucleic acid comprises a guide strand sequence comprising or consisting of the nucleic acid sequence set forth in any one of SEQ ID NOS:1908-2007 with at least 1, 2, 3, 4, or 5 mismatches to the target ATXN2 mRNA sequence. In some embodiments, the isolated nucleic acid comprises an expression construct encoding an inhibitory nucleic acid that inhibits the expression or activity of ATXN2, wherein the inhibitory nucleic acid comprises a guide strand sequence comprising or consisting of a nucleic acid sequence that is at least 60%, 70%, 75%, 80%, 85%, 90%, 95%, 97%, 99%, or 100% identical to any one of SEQ ID NOS:1908-2007. In some embodiments, the isolated nucleic acid comprises an expression construct encoding an inhibitory nucleic acid that inhibits the expression or activity of ATXN2, wherein the inhibitory nucleic acid comprises a guide strand sequence comprising or consisting of at least 15, 16, 17, 18, 19, 20, 21, or 22 contiguous nucleotides of a sequence of any one of SEQ ID NOS:1908-2007, preferably wherein the guide strand sequence retains positions 2-7 (“seed sequence”) of the selected SEQ ID NO. In some embodiments, the isolated nucleic acid comprises an expression construct encoding an inhibitory nucleic acid that inhibits the expression or activity of ATXN2, wherein the inhibitory nucleic acid comprises a guide strand sequence comprising or consisting of a sequence of any one of SEQ ID NOS: 1908-2007, wherein 1, 2, 3, or 4 nucleotides at positions 19-22 differ from the selected SEQ ID NO (variant nucleotide(s)), such that the guide strand sequence is no longer complementary to the ATXN2 target sequence at the variant nucleotide(s).

[0189] In some embodiments, the isolated nucleic acid comprises an expression construct encoding an inhibitory nucleic acid that inhibits the expression or activity of ATXN2, wherein the inhibitory nucleic acid comprises a guide strand sequence of Table 24. In some embodiments, the inhibitory nucleic acid comprises a guide strand sequence comprising or consisting of the nucleic acid sequence set forth in any one of SEQ ID NOS:100, 112, 166, 202, 246, 306, 308, 314, 1180, 1185, 1196, 1200, 1211, 1213, 1215, 1216, 1224, 1811-1822, 1824-1827, 2015, 2065, 2083, 2152, 2203, and 2209. In some embodiments, the isolated nucleic acid comprises an expression construct encoding an inhibitory nucleic acid that inhibits the expression or activity of ATXN2, wherein the inhibitory nucleic acid comprises a guide strand sequence comprising or consisting of the nucleic acid sequence set forth in any one of SEQ ID NOS:100, 112, 166, 202, 246, 306, 308, 314, 1180, 1185, 1196, 1200, 1211, 1213, 1215, 1216, 1224, 1811-1822, 1824-1827, 2015, 2065, 2083, 2152, 2203, and 2209 with at least 1, 2, 3, 4, or 5 mismatches to the target ATXN2 mRNA sequence. In some embodiments, the isolated nucleic acid comprises an expression construct encoding an inhibitory nucleic acid that inhibits the expression or activity of ATXN2, wherein the inhibitory nucleic acid comprises a guide strand sequence comprising or consisting of a nucleic acid sequence that is at least 60%, 70%, 75%, 80%, 85%, 90%, 95%, 97%, 99%, or 100% identical to any one of SEQ ID NOS:100, 112, 166, 202, 246, 306, 308, 314, 1180, 1185, 1196, 1200, 1211, 1213, 1215, 1216, 1224, 1811-1822, 1824-1827, 2015, 2065, 2083, 2152, 2203, and 2209. In some embodiments, the isolated nucleic acid comprises an expression construct encoding an inhibitory nucleic acid that inhibits the expression or activity of ATXN2, wherein the inhibitory nucleic acid comprises a guide strand sequence comprising or consisting of at least 15, 16, 17, 18, 19, 20, 21, or 22 contiguous nucleotides of a sequence of any one of SEQ ID NOS:100, 112, 166, 202, 246, 306, 308, 314, 1180, 1185, 1196, 1200, 1211, 1213, 1215, 1216, 1224, 1811-1822, 1824-1827, 2015, 2065, 2083, 2152, 2203, and 2209, preferably wherein the guide strand sequence retains positions 2-7 (“seed sequence”) of the selected SEQ ID NO. In some embodiments, the isolated nucleic acid comprises an expression construct encoding an inhibitory nucleic acid that inhibits the expression or activity of ATXN2, wherein the inhibitory nucleic acid comprises a guide strand sequence comprising or consisting of a sequence of any one of SEQ ID NOS:100, 112, 166, 202, 246, 306, 308, 314, 1180, 1185, 1196, 1200, 1211, 1213, 1215, 1216, 1224, 1811-1822, 1824-1827, 2015, 2065, 2083, 2152, 2203, and 2209, wherein 1, 2, 3, or 4 nucleotides at positions 19-22 differ from the selected SEQ ID NO (variant nucleotide(s)), such that the guide strand sequence is no longer complementary to the ATXN2 target sequence at the variant nucleotide(s).

[0190] In some embodiments, the isolated nucleic acid comprises an expression construct encoding an inhibitory nucleic acid that inhibits the expression or activity of ATXN2, wherein the inhibitory nucleic acid comprises a guide strand sequence of Table 25. In some embodiments, the inhibitory nucleic acid comprises a guide strand sequence comprising or consisting of the nucleic acid sequence set forth in any one of SEQ ID NOS:1185, 1816, 1213, 1819, 2083, 1215, 1216, 1811, and 314. In some embodiments, the isolated nucleic acid comprises an expression construct encoding an inhibitory nucleic acid that inhibits the expression or activity of ATXN2, wherein the inhibitory nucleic acid comprises a guide strand sequence comprising or consisting of the nucleic acid sequence set forth in any one of SEQ ID NOS:1185, 1816, 1213, 1819, 2083, 1215, 1216, 1811, and 314 with at least 1, 2, 3, 4, or 5 mismatches to the target ATXN2 mRNA sequence. In some embodiments, the isolated nucleic acid comprises an expression construct encoding an inhibitory nucleic acid that inhibits the expression or activity of ATXN2, wherein the inhibitory nucleic acid comprises a guide strand sequence comprising or consisting of a nucleic acid sequence that is at least 60%, 70%, 75%, 80%, 85%, 90%, 95%, 97%, 99%, or 100% identical to any one of SEQ ID NOS:1185, 1816, 1213, 1819, 2083, 1215, 1216, 1811, and 314. In some embodiments, the isolated nucleic acid comprises an expression construct encoding an inhibitory nucleic acid that inhibits the expression or activity of ATXN2, wherein the inhibitory nucleic acid comprises a guide strand sequence comprising or consisting of at least 15, 16, 17, 18, 19, 20, 21, or 22 contiguous nucleotides of a sequence of any one of SEQ ID NOS:1185, 1816, 1213, 1819, 2083, 1215, 1216, 1811, and 314, preferably wherein the guide strand sequence retains positions 2-7 (“seed sequence”) of the selected SEQ ID NO. In some embodiments, the isolated nucleic acid comprises an expression construct encoding an inhibitory nucleic acid that inhibits the expression or activity of ATXN2, wherein the inhibitory nucleic acid comprises a guide strand sequence comprising or consisting of a sequence of any one of SEQ ID NOS:1185, 1816, 1213, 1819, 2083, 1215, 1216, 1811, and 314, wherein 1, 2, 3, or 4 nucleotides at positions 19-22 differ from the selected SEQ ID NO (variant nucleotide(s)), such that the guide strand sequence is no longer complementary to the ATXN2 target sequence at the variant nucleotide(s).

[0191] In some embodiments, the isolated nucleic acid comprises an expression construct encoding an inhibitory nucleic acid that inhibits the expression or activity of ATXN2, wherein the inhibitory nucleic acid comprises a guide strand sequence comprising or consisting of the nucleic acid sequence set forth in any one of SEQ ID NOS:1185, 1816, 1213, and 1811. In some embodiments, the isolated nucleic acid comprises an expression construct encoding an inhibitory nucleic acid that inhibits the expression or activity of ATXN2, wherein the inhibitory nucleic acid comprises a guide strand sequence comprising or consisting of the nucleic acid sequence set forth in any one of SEQ ID NOS:1185, 1816, 1213, and 1811, with at least 1, 2, 3, 4, or 5 mismatches to the target ATXN2 mRNA sequence. In some embodiments, the isolated nucleic acid comprises an expression construct encoding an inhibitory nucleic acid that inhibits the expression or activity of ATXN2, wherein the inhibitory nucleic acid comprises a guide strand sequence comprising or consisting of a nucleic acid sequence that is at least 60%, 70%, 75%, 80%, 85%, 90%, 95%, 97%, 99%, or 100% identical to any one of SEQ ID NOS:1185, 1816, 1213, and 1811. In some embodiments, the isolated nucleic acid comprises an expression construct encoding an inhibitory nucleic acid that inhibits the expression or activity of ATXN2, wherein the inhibitory nucleic acid comprises a guide strand sequence comprising or consisting of at least 15, 16, 17, 18, 19, 20, 21, or 22 contiguous nucleotides of a sequence of any one of SEQ ID NOS:1185, 1816, 1213, and 1811, preferably wherein the guide strand sequence retains positions 2-7 (“seed sequence”) of the selected SEQ ID NO. In some embodiments, the isolated nucleic acid comprises an expression construct encoding an inhibitory nucleic acid that inhibits the expression or activity of ATXN2, wherein the inhibitory nucleic acid comprises a guide strand sequence comprising or consisting of a sequence of any one of SEQ ID NOS:1185, 1816, 1213, and 1811, wherein 1, 2, 3, or 4 nucleotides at positions 19-22 differ from the selected SEQ ID NO (variant nucleotide(s)), such that the guide strand sequence is no longer complementary to the ATXN2 target sequence at the variant nucleotide(s).

[0192] In some embodiments, the isolated nucleic acid comprises an expression construct encoding a siRNA duplex that targets ATXN2 mRNA to interfere with ATXN2 expression by mRNA degradation or translational inhibition. In some embodiments, the guide strand of the siRNA duplex may be about 18 nucleotides, 19 nucleotides, 20 nucleotides, 21 nucleotides, 22 nucleotides, 23 nucleotides, 24 nucleotides, 25 nucleotides, 26 nucleotides, 27 nucleotides, 28 nucleotides, 29 nucleotides, or 30 nucleotides in length or 18-30, 18-29, 18-28, 18-27, 18-26, 18-25, 18-24, 18-23, 18-22, 18-20, 19-30, 19-29, 19-28, 19-27, 19-26, 19-25, 19-24, 19-23, 19-22, 19-21, 20-30, 20-29, 20-28, 20-27, 20-26, 20-25, 20-24, 20-23, 20-22, 21-30, 21-29, 21-28, 21-27, 21-26, 21-25, 21-24, 21-23, 22-30, 22-29, 22-28, 22-27, 22-26, 22-24, 23-30, 23-29, 23-28, 23-27, 23-26, 23-25, 24-30, 24-29, 24-28, 24-27, 24-26, 25-30, 25-29, 25-28, 25-27, 26-30, 26-29, 26-28, 27-30, 27-29, 28-30 nucleotides in length. In some embodiments, the passenger strand of the siRNA duplex may be about 18 nucleotides, 19 nucleotides, 20 nucleotides, 21 nucleotides, 22 nucleotides, 23 nucleotides, 24 nucleotides, 25 nucleotides, 26 nucleotides, 27 nucleotides, 28 nucleotides, 29 nucleotides, or 30 nucleotides in length or 18-30, 18-29, 18-28, 18-27, 18-26, 18-25, 18-24, 18-23, 18-22, 18-20, 19-30, 19-29, 19-28, 19-27, 19-26, 19-25, 19-24, 19-23, 19-22, 19-21, 20-30, 20-29, 20-28, 20-27, 20-26, 20-25, 20-24, 20-23, 20-22, 21-30, 21-29, 21-28, 21-27, 21-26, 21-25, 21-24, 21-23, 22-30, 22-29, 22-28, 22-27, 22-26, 22-24, 23-30, 23-29, 23-28, 23-27, 23-26, 23-25, 24-30, 24-29, 24-28, 24-27, 24-26, 25-30, 25-29, 25-28, 25-27, 26-30, 26-29, 26-28, 27-30, 27-29, 28-30 nucleotides in length. In some embodiments, the siRNA duplex contains 2 or 3 nucleotide 3′ overhangs on each strand. In some embodiments, the 3′ overhangs are complementary to the ATXN2 transcript. In some embodiments, the guide strand and passenger strand of the siRNA duplex are at least 60%, 65%, 70%, 75%, 80%, 85%, 90%, 95%, 97%, or 100% complementary to each other, not including any nucleotides in overhang(s).

[0193] In some embodiments, the isolated nucleic acid comprises an expression construct encoding a siRNA duplex that comprises a guide strand sequence comprising or consisting of the nucleic acid sequence set forth in any one of the guide sequences of Tables 1, 3, 9, 11, 12, 13, 19, 23, and 24, e.g., any one of SEQ ID NOS: 4, 6, 8, 10, 12, 14, 16, 18, 20, 22, 24, 26, 28, 30, 32, 34, 36, 38, 40, 42, 44, 46, 48, 50, 52, 54, 56, 58, 60, 62, 64, 66, 68, 70, 72, 74, 76, 78, 80, 82, 84, 86, 88, 90, 92, 94, 96, 98, 100, 102, 104, 106, 108, 110, 112, 114, 116, 118, 120, 124, 126, 128, 130, 132, 134, 136, 138, 140, 142, 144, 146, 148, 150, 152, 154, 156, 158, 160, 162, 164, 166, 168, 170, 172, 174, 176, 178, 180, 182, 184, 186, 188, 190, 192, 194, 196, 198, 200, 202, 204, 206, 208, 210, 212, 214, 216, 218, 220, 222, 224, 226, 228, 230, 232, 234, 236, 238, 240, 242, 244, 246, 248, 250, 252, 254, 256, 258, 260, 262, 264, 266, 268, 270, 272, 274, 276, 278, 280, 282, 284, 286, 288, 290, 292, 294, 296, 298, 300, 302, 304, 306, 308, 310, 312, 314, 316, 318, 320, 324, 326, 328, 330, 332, 334, 336, 338, 340, 342, 344, 346, 348, 350, 352, 354, 356, 358, 360, 362, 364, 366, 368, 370, 372, 374, 376, 378, 380, 382, 384, 386, 388, 390, 392, 394, 396, 398, 400, 402, 404, 406, 408, 410, 412, 414, 416, 418, 420, 422, 424, 426, 428, 430, 432, 434, 436, 1176-1288, 1811-1827, 2015, 2065, 2083, 2152, 2203, and 2209.

[0194] In some embodiments, the isolated nucleic acid comprises an expression construct encoding a siRNA duplex that comprises a guide strand sequence comprising or consisting of the nucleic acid sequence set forth in any one of the guide sequences of Tables 1, 3, 9, 11, 12, 13, 19, 23, and 24, e.g., any one of SEQ ID NOS: 4, 6, 8, 10, 12, 14, 16, 18, 20, 22, 24, 26, 28, 30, 32, 34, 36, 38, 40, 42, 44, 46, 48, 50, 52, 54, 56, 58, 60, 62, 64, 66, 68, 70, 72, 74, 76, 78, 80, 82, 84, 86, 88, 90, 92, 94, 96, 98, 100, 102, 104, 106, 108, 110, 112, 114, 116, 118, 120, 124, 126, 128, 130, 132, 134, 136, 138, 140, 142, 144, 146, 148, 150, 152, 154, 156, 158, 160, 162, 164, 166, 168, 170, 172, 174, 176, 178, 180, 182, 184, 186, 188, 190, 192, 194, 196, 198, 200, 202, 204, 206, 208, 210, 212, 214, 216, 218, 220, 222, 224, 226, 228, 230, 232, 234, 236, 238, 240, 242, 244, 246, 248, 250, 252, 254, 256, 258, 260, 262, 264, 266, 268, 270, 272, 274, 276, 278, 280, 282, 284, 286, 288, 290, 292, 294, 296, 298, 300, 302, 304, 306, 308, 310, 312, 314, 316, 318, 320, 324, 326, 328, 330, 332, 334, 336, 338, 340, 342, 344, 346, 348, 350, 352, 354, 356, 358, 360, 362, 364, 366, 368, 370, 372, 374, 376, 378, 380, 382, 384, 386, 388, 390, 392, 394, 396, 398, 400, 402, 404, 406, 408, 410, 412, 414, 416, 418, 420, 422, 424, 426, 428, 430, 432, 434, 436, 1176-1288, 1811-1827, 2015, 2065, 2083, 2152, 2203, and 2209, with at least 1, 2, 3, 4, or 5 mismatches to the target ATXN2 mRNA sequence.

[0195] In some embodiments, the isolated nucleic acid comprises an expression construct encoding a siRNA duplex that comprises a guide strand sequence sequence comprising of consisting of a sequence that at least 60%, 70%, 75%, 80%, 85%, 90%, 95%, 97%, 99%, or 100% identical to any one of the guide sequences of Tables 1, 3, 9, 11, 12, 13, 19, 23, and 24, e.g., any one of SEQ ID NOS: 4, 6, 8, 10, 12, 14, 16, 18, 20, 22, 24, 26, 28, 30, 32, 34, 36, 38, 40, 42, 44, 46, 48, 50, 52, 54, 56, 58, 60, 62, 64, 66, 68, 70, 72, 74, 76, 78, 80, 82, 84, 86, 88, 90, 92, 94, 96, 98, 100, 102, 104, 106, 108, 110, 112, 114, 116, 118, 120, 124, 126, 128, 130, 132, 134, 136, 138, 140, 142, 144, 146, 148, 150, 152, 154, 156, 158, 160, 162, 164, 166, 168, 170, 172, 174, 176, 178, 180, 182, 184, 186, 188, 190, 192, 194, 196, 198, 200, 202, 204, 206, 208, 210, 212, 214, 216, 218, 220, 222, 224, 226, 228, 230, 232, 234, 236, 238, 240, 242, 244, 246, 248, 250, 252, 254, 256, 258, 260, 262, 264, 266, 268, 270, 272, 274, 276, 278, 280, 282, 284, 286, 288, 290, 292, 294, 296, 298, 300, 302, 304, 306, 308, 310, 312, 314, 316, 318, 320, 324, 326, 328, 330, 332, 334, 336, 338, 340, 342, 344, 346, 348, 350, 352, 354, 356, 358, 360, 362, 364, 366, 368, 370, 372, 374, 376, 378, 380, 382, 384, 386, 388, 390, 392, 394, 396, 398, 400, 402, 404, 406, 408, 410, 412, 414, 416, 418, 420, 422, 424, 426, 428, 430, 432, 434, 436, 1176-1288, 1811-1827, 2015, 2065, 2083, 2152, 2203, and 2209.

[0196] In some embodiments, the isolated nucleic acid comprises an expression construct encoding a siRNA duplex that comprises a guide strand sequence comprising or consisting of at least 15, 16, 17, 18, 19, 20, 21, or 22 contiguous nucleotides of a sequence of any one of the guide sequences of Tables 1, 3, 9, 11, 12, 13, 19, 23, and 24, e.g., any one of SEQ ID NOS: 4, 6, 8, 10, 12, 14, 16, 18, 20, 22, 24, 26, 28, 30, 32, 34, 36, 38, 40, 42, 44, 46, 48, 50, 52, 54, 56, 58, 60, 62, 64, 66, 68, 70, 72, 74, 76, 78, 80, 82, 84, 86, 88, 90, 92, 94, 96, 98, 100, 102, 104, 106, 108, 110, 112, 114, 116, 118, 120, 124, 126, 128, 130, 132, 134, 136, 138, 140, 142, 144, 146, 148, 150, 152, 154, 156, 158, 160, 162, 164, 166, 168, 170, 172, 174, 176, 178, 180, 182, 184, 186, 188, 190, 192, 194, 196, 198, 200, 202, 204, 206, 208, 210, 212, 214, 216, 218, 220, 222, 224, 226, 228, 230, 232, 234, 236, 238, 240, 242, 244, 246, 248, 250, 252, 254, 256, 258, 260, 262, 264, 266, 268, 270, 272, 274, 276, 278, 280, 282, 284, 286, 288, 290, 292, 294, 296, 298, 300, 302, 304, 306, 308, 310, 312, 314, 316, 318, 320, 324, 326, 328, 330, 332, 334, 336, 338, 340, 342, 344, 346, 348, 350, 352, 354, 356, 358, 360, 362, 364, 366, 368, 370, 372, 374, 376, 378, 380, 382, 384, 386, 388, 390, 392, 394, 396, 398, 400, 402, 404, 406, 408, 410, 412, 414, 416, 418, 420, 422, 424, 426, 428, 430, 432, 434, 436, 1176-1288, 1811-1827, 2015, 2065, 2083, 2152, 2203, and 2209, preferably wherein the guide strand sequence retains positions 2-7 (“seed sequence”) of the selected SEQ ID NO.

[0197] In some embodiments, the isolated nucleic acid comprises an expression construct encoding a siRNA duplex that comprises a guide strand sequence comprising or consisting of any one of the guide sequences of Tables 1, 3, 9, 11, 12, 13, 19, 23, and 24, e.g., any one of SEQ ID NOS: 4, 6, 8, 10, 12, 14, 16, 18, 20, 22, 24, 26, 28, 30, 32, 34, 36, 38, 40, 42, 44, 46, 48, 50, 52, 54, 56, 58, 60, 62, 64, 66, 68, 70, 72, 74, 76, 78, 80, 82, 84, 86, 88, 90, 92, 94, 96, 98, 100, 102, 104, 106, 108, 110, 112, 114, 116, 118, 120, 124, 126, 128, 130, 132, 134, 136, 138, 140, 142, 144, 146, 148, 150, 152, 154, 156, 158, 160, 162, 164, 166, 168, 170, 172, 174, 176, 178, 180, 182, 184, 186, 188, 190, 192, 194, 196, 198, 200, 202, 204, 206, 208, 210, 212, 214, 216, 218, 220, 222, 224, 226, 228, 230, 232, 234, 236, 238, 240, 242, 244, 246, 248, 250, 252, 254, 256, 258, 260, 262, 264, 266, 268, 270, 272, 274, 276, 278, 280, 282, 284, 286, 288, 290, 292, 294, 296, 298, 300, 302, 304, 306, 308, 310, 312, 314, 316, 318, 320, 324, 326, 328, 330, 332, 334, 336, 338, 340, 342, 344, 346, 348, 350, 352, 354, 356, 358, 360, 362, 364, 366, 368, 370, 372, 374, 376, 378, 380, 382, 384, 386, 388, 390, 392, 394, 396, 398, 400, 402, 404, 406, 408, 410, 412, 414, 416, 418, 420, 422, 424, 426, 428, 430, 432, 434, 436, 1176-1288, 1811-1827, 2015, 2065, 2083, 2152, 2203, and 2209, wherein 1, 2, 3, or 4 nucleotides at positions 19-22 differ from the selected SEQ ID NO (variant nucleotide(s)), such that the guide strand sequence is no longer complementary to the ATXN2 target sequence at the variant nucleotide(s).

[0198] In some embodiments, the isolated nucleic acid comprises an expression construct encoding a siRNA duplex that comprises a guide strand sequence of Table 12. In some embodiments, the isolated nucleic acid comprises an expression construct encoding a siRNA duplex that comprises a guide strand sequence comprising or consisting of the nucleic acid sequence set forth in any one of SEQ ID NOS: 12, 14, 40, 60, 100, 104, 108, 112, 124, 126, 128, 166, 198, 220, 242, 302, 306, 308, 330, 336, and 362. In some embodiments, the isolated nucleic acid comprises an expression construct encoding a siRNA duplex that comprises a guide strand sequence comprising or consisting of the nucleic acid sequence set forth in any one of SEQ ID NOS: 12, 14, 40, 60, 100, 104, 108, 112, 124, 126, 128, 166, 198, 220, 242, 302, 306, 308, 330, 336, and 362 with at least 1, 2, 3, 4, or 5 mismatches to the target ATXN2 mRNA sequence. In some embodiments, the siRNA duplex comprises a guide strand sequence comprising or consisting of a nucleic acid sequence that is at least 60%, 70%, 75%, 80%, 85%, 90%, 95%, 97%, 99%, or 100% identical to any one of SEQ ID NOS: 12, 14, 40, 60, 100, 104, 108, 112, 124, 126, 128, 166, 198, 220, 242, 302, 306, 308, 330, 336, and 362. In some embodiments, the isolated nucleic acid comprises an expression construct encoding a siRNA duplex that comprises a guide strand sequence comprising or consisting of at least 15, 16, 17, 18, 19, 20, 21, or 22 contiguous nucleotides of a sequence of any one of SEQ ID NOS: 12, 14, 40, 60, 100, 104, 108, 112, 124, 126, 128, 166, 198, 220, 242, 302, 306, 308, 330, 336, and 362, preferably wherein the guide strand sequence retains positions 2-7 (“seed sequence”) of the selected SEQ ID NO. In some embodiments, the isolated nucleic acid comprises an expression construct encoding a siRNA duplex that comprises a guide strand sequence comprising or consisting of a sequence of any one of SEQ ID NOS: 12, 14, 40, 60, 100, 104, 108, 112, 124, 126, 128, 166, 198, 220, 242, 302, 306, 308, 330, 336, and 362, wherein 1, 2, 3, or 4 nucleotides at positions 19-22 differ from the selected SEQ ID NO (variant nucleotide(s)), such that the guide strand sequence is no longer complementary to the ATXN2 target sequence at the variant nucleotide(s).

[0199] In some embodiments, the isolated nucleic acid comprises an expression construct encoding a siRNA duplex that comprises a guide strand sequence of Table 13. In some embodiments, the isolated nucleic acid comprises an expression construct encoding a siRNA duplex that comprises a guide strand sequence comprising or consisting of the nucleic acid sequence set forth in any one of SEQ ID NOS: 14, 40, 100, 108, 112, 128, 166, 198, 242, 308, 336, and 362. In some embodiments, the isolated nucleic acid comprises an expression construct encoding a siRNA duplex that comprises a guide strand sequence comprising or consisting of the nucleic acid sequence set forth in any one of SEQ ID NOS: 14, 40, 100, 108, 112, 128, 166, 198, 242, 308, 336, and 362 with at least 1, 2, 3, 4, or 5 mismatches to the target ATXN2 mRNA sequence. In some embodiments, the isolated nucleic acid comprises an expression construct encoding a siRNA duplex that comprises a guide strand sequence comprising or consisting of a nucleic acid sequence that is at least 60%, 70%, 75%, 80%, 85%, 90%, 95%, 97%, 99%, or 100% identical to any one of SEQ ID NOS: 14, 40, 100, 108, 112, 128, 166, 198, 242, 308, 336, and 362. In some embodiments, the isolated nucleic acid comprises an expression construct encoding a siRNA duplex that comprises a guide strand sequence comprising a guide strand sequence comprising or consisting of at least 15, 16, 17, 18, 19, 20, 21, or 22 contiguous nucleotides of a sequence of any one of SEQ ID NOS: 14, 40, 100, 108, 112, 128, 166, 198, 242, 308, 336, and 362, preferably wherein the guide strand sequence retains positions 2-7 (“seed sequence”) of the selected SEQ ID NO. In some embodiments, the isolated nucleic acid comprises an expression construct encoding a siRNA duplex that comprises a guide strand sequence comprising or consisting of a sequence of any one of SEQ ID NOS: 14, 40, 100, 108, 112, 128, 166, 198, 242, 308, 336, and 362, wherein 1, 2, 3, or 4 nucleotides at positions 19-22 differ from the selected SEQ ID NO (variant nucleotide(s)), such that the guide strand sequence is no longer complementary to the ATXN2 target sequence at the variant nucleotide(s).

[0200] In some embodiments, the isolated nucleic acid comprises an expression construct encoding a siRNA duplex that comprises a guide strand sequence of Table 19. In some embodiments, the isolated nucleic acid comprises an expression construct encoding a siRNA duplex that comprises a guide strand sequence comprising or consisting of the nucleic acid sequence set forth in any one of SEQ ID NOS:1176-1288, 40, 108, and 166. In some embodiments, the isolated nucleic acid comprises an expression construct encoding a siRNA duplex that comprises a guide strand sequence comprising or consisting of the nucleic acid sequence set forth in any one of SEQ ID NOS:1176-1288, 40, 108, and 166 with at least 1, 2, 3, 4, or 5 mismatches to the target ATXN2 mRNA sequence. In some embodiments, the isolated nucleic acid comprises an expression construct encoding a siRNA duplex that comprises a guide strand sequence comprising or consisting of a nucleic acid sequence that is at least 60%, 70%, 75%, 80%, 85%, 90%, 95%, 97%, 99%, or 100% identical to any one of SEQ ID NOS:1176-1288, 40, 108, and 166. In some embodiments, the isolated nucleic acid comprises an expression construct encoding a siRNA duplex that comprises a guide strand sequence comprising a guide strand sequence comprising or consisting of at least 15, 16, 17, 18, 19, 20, 21, or 22 contiguous nucleotides of a sequence of any one of SEQ ID NOS:1176-1288, 40, 108, and 166, preferably wherein the guide strand sequence retains positions 2-7 (“seed sequence”) of the selected SEQ ID NO. In some embodiments, the isolated nucleic acid comprises an expression construct encoding a siRNA duplex that comprises a guide strand sequence comprising or consisting of a sequence of any one of SEQ ID NOS:1176-1288, 40, 108, and 166, wherein 1, 2, 3, or 4 nucleotides at positions 19-22 differ from the selected SEQ ID NO (variant nucleotide(s)), such that the guide strand sequence is no longer complementary to the ATXN2 target sequence at the variant nucleotide(s).

[0201] In some embodiments, the isolated nucleic acid comprises an expression construct encoding a siRNA duplex that comprises a guide strand sequence of Table 23. In some embodiments, the isolated nucleic acid comprises an expression construct encoding a siRNA duplex that comprises a guide strand sequence comprising or consisting of the nucleic acid sequence set forth in any one of SEQ ID NOS:1908-2007. In some embodiments, the isolated nucleic acid comprises an expression construct encoding a siRNA duplex that comprises a guide strand sequence comprising or consisting of the nucleic acid sequence set forth in any one of SEQ ID NOS:1908-2007 with at least 1, 2, 3, 4, or 5 mismatches to the target ATXN2 mRNA sequence. In some embodiments, the isolated nucleic acid comprises an expression construct encoding a siRNA duplex that comprises a guide strand sequence comprising or consisting of a nucleic acid sequence that is at least 60%, 70%, 75%, 80%, 85%, 90%, 95%, 97%, 99%, or 100% identical to any one of SEQ ID NOS:1908-2007. In some embodiments, the isolated nucleic acid comprises an expression construct encoding a siRNA duplex that comprises a guide strand sequence comprising a guide strand sequence comprising or consisting of at least 15, 16, 17, 18, 19, 20, 21, or 22 contiguous nucleotides of a sequence of any one of SEQ ID NOS:1908-2007, preferably wherein the guide strand sequence retains positions 2-7 (“seed sequence”) of the selected SEQ ID NO. In some embodiments, the isolated nucleic acid comprises an expression construct encoding a siRNA duplex that comprises a guide strand sequence comprising or consisting of a sequence of any one of SEQ ID NOS:1908-2007, wherein 1, 2, 3, or 4 nucleotides at positions 19-22 differ from the selected SEQ ID NO (variant nucleotide(s)), such that the guide strand sequence is no longer complementary to the ATXN2 target sequence at the variant nucleotide(s).

[0202] In some embodiments, the isolated nucleic acid comprises an expression construct encoding a siRNA duplex that comprises a guide strand sequence of Table 24. In some embodiments, the isolated nucleic acid comprises an expression construct encoding a siRNA duplex that comprises a guide strand sequence comprising or consisting of the nucleic acid sequence set forth in any one of SEQ ID NOS:100, 112, 166, 202, 246, 306, 308, 314, 1180, 1185, 1196, 1200, 1211, 1213, 1215, 1216, 1224, 1811-1822, 1824-1827, 2015, 2065, 2083, 2152, 2203, and 2209. In some embodiments, the isolated nucleic acid comprises an expression construct encoding a siRNA duplex that comprises a guide strand sequence comprising or consisting of the nucleic acid sequence set forth in any one of SEQ ID NOS:100, 112, 166, 202, 246, 306, 308, 314, 1180, 1185, 1196, 1200, 1211, 1213, 1215, 1216, 1224, 1811-1822, 1824-1827, 2015, 2065, 2083, 2152, 2203, and 2209, with at least 1, 2, 3, 4, or 5 mismatches to the target ATXN2 mRNA sequence. In some embodiments, the isolated nucleic acid comprises an expression construct encoding a siRNA duplex that comprises a guide strand sequence comprising or consisting of a nucleic acid sequence that is at least 60%, 70%, 75%, 80%, 85%, 90%, 95%, 97%, 99%, or 100% identical to any one of SEQ ID NOS:100, 112, 166, 202, 246, 306, 308, 314, 1180, 1185, 1196, 1200, 1211, 1213, 1215, 1216, 1224, 1811-1822, 1824-1827, 2015, 2065, 2083, 2152, 2203, and 2209. In some embodiments, the isolated nucleic acid comprises an expression construct encoding a siRNA duplex that comprises a guide strand sequence comprising a guide strand sequence comprising or consisting of at least 15, 16, 17, 18, 19, 20, 21, or 22 contiguous nucleotides of a sequence of any one of SEQ ID NOS:100, 112, 166, 202, 246, 306, 308, 314, 1180, 1185, 1196, 1200, 1211, 1213, 1215, 1216, 1224, 1811-1822, 1824-1827, 2015, 2065, 2083, 2152, 2203, and 2209, preferably wherein the guide strand sequence retains positions 2-7 (“seed sequence”) of the selected SEQ ID NO. In some embodiments, the isolated nucleic acid comprises an expression construct encoding a siRNA duplex that comprises a guide strand sequence comprising or consisting of a sequence of any one of SEQ ID NOS:100, 112, 166, 202, 246, 306, 308, 314, 1180, 1185, 1196, 1200, 1211, 1213, 1215, 1216, 1224, 1811-1822, 1824-1827, 2015, 2065, 2083, 2152, 2203, and 2209, wherein 1, 2, 3, or 4 nucleotides at positions 19-22 differ from the selected SEQ ID NO (variant nucleotide(s)), such that the guide strand sequence is no longer complementary to the ATXN2 target sequence at the variant nucleotide(s).

[0203] In some embodiments, the isolated nucleic acid comprises an expression construct encoding a siRNA duplex that comprises a guide strand sequence of Table 25. In some embodiments, the isolated nucleic acid comprises an expression construct encoding a siRNA duplex that comprises a guide strand sequence comprising or consisting of the nucleic acid sequence set forth in any one of SEQ ID NOS:1185, 1816, 1213, 1819, 2083, 1215, 1216, 1811, and 314. In some embodiments, the isolated nucleic acid comprises an expression construct encoding a siRNA duplex that comprises a guide strand sequence comprising or consisting of the nucleic acid sequence set forth in any one of SEQ ID NOS:1185, 1816, 1213, 1819, 2083, 1215, 1216, 1811, and 314, with at least 1, 2, 3, 4, or 5 mismatches to the target ATXN2 mRNA sequence. In some embodiments, the isolated nucleic acid comprises an expression construct encoding a siRNA duplex that comprises a guide strand sequence comprising or consisting of a nucleic acid sequence that is at least 60%, 70%, 75%, 80%, 85%, 90%, 95%, 97%, 99%, or 100% identical to any one of SEQ ID NOS:1185, 1816, 1213, 1819, 2083, 1215, 1216, 1811, and 314. In some embodiments, the isolated nucleic acid comprises an expression construct encoding a siRNA duplex that comprises a guide strand sequence comprising a guide strand sequence comprising or consisting of at least 15, 16, 17, 18, 19, 20, 21, or 22 contiguous nucleotides of a sequence of any one of SEQ ID NOS:1185, 1816, 1213, 1819, 2083, 1215, 1216, 1811, and 314, preferably wherein the guide strand sequence retains positions 2-7 (“seed sequence”) of the selected SEQ ID NO. In some embodiments, the isolated nucleic acid comprises an expression construct encoding a siRNA duplex that comprises a guide strand sequence comprising or consisting of a sequence of any one of SEQ ID NOS:1185, 1816, 1213, 1819, 2083, 1215, 1216, 1811, and 314, wherein 1, 2, 3, or 4 nucleotides at positions 19-22 differ from the selected SEQ ID NO (variant nucleotide(s)), such that the guide strand sequence is no longer complementary to the ATXN2 target sequence at the variant nucleotide(s).

[0204] In some embodiments the isolated nucleic acid comprises an expression construct encoding a siRNA duplex comprising a guide strand sequence and passenger strand sequence of any one of siRNA duplexes provided in Tables 1, 19, 23, and 24. In some embodiments the isolated nucleic acid comprises an expression construct encoding a siRNA duplex comprising a guide strand sequence and passenger strand sequence, comprising or consisting of any one of: SEQ ID NOS:12 and 11; SEQ ID NOS: 14 and 13; SEQ ID NOS: 40 and 39; SEQ ID NOS: 60 and 59; SEQ ID NOS: 100 and 99; SEQ ID NOS: 104 and 103; SEQ ID NOS: 108 and 107; SEQ ID NOS: 112 and 111; SEQ ID NOS: 124 and 123; SEQ ID NOS: 126 and 125; SEQ ID NOS: 128 and 127; SEQ ID NOS: 166 and 165; SEQ ID NOS: 198 and 197; SEQ ID NOS: 220 and 219; SEQ ID NOS: 242 and 241; SEQ ID NOS: 302 and 301; SEQ ID NOS: 306 and 305; SEQ ID NOS: 308 and 307; SEQ ID NOS: 330 and 320; SEQ ID NOS: 336 and 335; and SEQ ID NOS: 362 and 361. In some embodiments the isolated nucleic acid comprises an expression construct encoding a siRNA duplex comprising a guide strand sequence and passenger strand sequence comprising or consisting of any one of: SEQ ID NOS:14 and 13; SEQ ID NOS: 40 and 39; SEQ ID NOS: 100 and 99; SEQ ID NOS: 108 and 107: SEQ ID NOS: 112 and 11; SEQ ID NOS: 128 and 127; SEQ ID NOS: 166 and 165; SEQ ID NOS: 198 and 197; SEQ ID NOS: 242 and 241; SEQ ID NOS: 308 and 307; SEQ ID NOS: 336 and 335; and SEQ ID NOS: 362 and 361.

[0205] In some embodiments, the isolated nucleic acid comprises an expression construct encoding a shRNA comprising a guide strand and passenger strand of a siRNA duplex as provided herein, linked by a short spacer sequence, i.e., loop. In some embodiments, loop sequence is 4, 5, 6, 7, 8, 9, or 10 nucleotides in length or 4-10, 4-9, 4-8, 4-7, 4-6, 5-10, 5-9, 5-8, 5-7, 6-9, 6-8, 7-10, 7-9, or 8-10 nucleotides in length.

[0206] In some embodiments, the isolated nucleic acid comprises an expression construct encoding a miRNA, such as a pri-miRNA, a pre-mRNA, an artificial miRNA, or a mature miRNA, wherein the miRNA comprises a guide strand sequence comprising or consisting of the nucleic acid sequence set forth in any one of the guide sequences of Tables 1, 3, 9, 11, 12, 13, 19, 23, 24, and 25, e.g., any one of SEQ ID NOS: 4, 6, 8, 10, 12, 14, 16, 18, 20, 22, 24, 26, 28, 30, 32, 34, 36, 38, 40, 42, 44, 46, 48, 50, 52, 54, 56, 58, 60, 62, 64, 66, 68, 70, 72, 74, 76, 78, 80, 82, 84, 86, 88, 90, 92, 94, 96, 98, 100, 102, 104, 106, 108, 110, 112, 114, 116, 118, 120, 124, 126, 128, 130, 132, 134, 136, 138, 140, 142, 144, 146, 148, 150, 152, 154, 156, 158, 160, 162, 164, 166, 168, 170, 172, 174, 176, 178, 180, 182, 184, 186, 188, 190, 192, 194, 196, 198, 200, 202, 204, 206, 208, 210, 212, 214, 216, 218, 220, 222, 224, 226, 228, 230, 232, 234, 236, 238, 240, 242, 244, 246, 248, 250, 252, 254, 256, 258, 260, 262, 264, 266, 268, 270, 272, 274, 276, 278, 280, 282, 284, 286, 288, 290, 292, 294, 296, 298, 300, 302, 304, 306, 308, 310, 312, 314, 316, 318, 320, 324, 326, 328, 330, 332, 334, 336, 338, 340, 342, 344, 346, 348, 350, 352, 354, 356, 358, 360, 362, 364, 366, 368, 370, 372, 374, 376, 378, 380, 382, 384, 386, 388, 390, 392, 394, 396, 398, 400, 402, 404, 406, 408, 410, 412, 414, 416, 418, 420, 422, 424, 426, 428, 430, 432, 434, 436, 1176-1288, 1811-1827, 2015, 2065, 2083, 2152, 2203, and 2209.

[0207] In some embodiments, the isolated nucleic acid comprises an expression construct encoding a miRNA, such as a pri-miRNA, a pre-mRNA, an artificial miRNA, or a mature miRNA, wherein the miRNA comprises a guide strand sequence comprising or consisting of the nucleic acid sequence set forth in any one of the guide sequences of Tables 1, 3, 9, 11, 12, 13, 19, 24, and 25, e.g., any one of SEQ ID NOS: 4, 6, 8, 10, 12, 14, 16, 18, 20, 22, 24, 26, 28, 30, 32, 34, 36, 38, 40, 42, 44, 46, 48, 50, 52, 54, 56, 58, 60, 62, 64, 66, 68, 70, 72, 74, 76, 78, 80, 82, 84, 86, 88, 90, 92, 94, 96, 98, 100, 102, 104, 106, 108, 110, 112, 114, 116, 118, 120, 124, 126, 128, 130, 132, 134, 136, 138, 140, 142, 144, 146, 148, 150, 152, 154, 156, 158, 160, 162, 164, 166, 168, 170, 172, 174, 176, 178, 180, 182, 184, 186, 188, 190, 192, 194, 196, 198, 200, 202, 204, 206, 208, 210, 212, 214, 216, 218, 220, 222, 224, 226, 228, 230, 232, 234, 236, 238, 240, 242, 244, 246, 248, 250, 252, 254, 256, 258, 260, 262, 264, 266, 268, 270, 272, 274, 276, 278, 280, 282, 284, 286, 288, 290, 292, 294, 296, 298, 300, 302, 304, 306, 308, 310, 312, 314, 316, 318, 320, 324, 326, 328, 330, 332, 334, 336, 338, 340, 342, 344, 346, 348, 350, 352, 354, 356, 358, 360, 362, 364, 366, 368, 370, 372, 374, 376, 378, 380, 382, 384, 386, 388, 390, 392, 394, 396, 398, 400, 402, 404, 406, 408, 410, 412, 414, 416, 418, 420, 422, 424, 426, 428, 430, 432, 434, 436, 1176-1288, 1811-1827, 2015, 2065, 2083, 2152, 2203, and 2209, with at least 1, 2, 3, 4, or 5 mismatches to the target ATXN2 mRNA sequence.

[0208] In some embodiments, the isolated nucleic acid comprises an expression construct encoding a miRNA, such as a pri-miRNA, a pre-mRNA, an artificial miRNA, or a mature miRNA, wherein the miRNA comprises a guide strand sequence comprising or consisting of a sequence that is at least 60%, 70%, 75%, 80%, 85%, 90%, 95%, 97%, 99%, or 100% identical to any one of the guide sequences of Tables 1, 3, 9, 11, 12, 13, 19, 23, 24, and 25, e.g., any one of SEQ ID NOS: 4, 6, 8, 10, 12, 14, 16, 18, 20, 22, 24, 26, 28, 30, 32, 34, 36, 38, 40, 42, 44, 46, 48, 50, 52, 54, 56, 58, 60, 62, 64, 66, 68, 70, 72, 74, 76, 78, 80, 82, 84, 86, 88, 90, 92, 94, 96, 98, 100, 102, 104, 106, 108, 110, 112, 114, 116, 118, 120, 124, 126, 128, 130, 132, 134, 136, 138, 140, 142, 144, 146, 148, 150, 152, 154, 156, 158, 160, 162, 164, 166, 168, 170, 172, 174, 176, 178, 180, 182, 184, 186, 188, 190, 192, 194, 196, 198, 200, 202, 204, 206, 208, 210, 212, 214, 216, 218, 220, 222, 224, 226, 228, 230, 232, 234, 236, 238, 240, 242, 244, 246, 248, 250, 252, 254, 256, 258, 260, 262, 264, 266, 268, 270, 272, 274, 276, 278, 280, 282, 284, 286, 288, 290, 292, 294, 296, 298, 300, 302, 304, 306, 308, 310, 312, 314, 316, 318, 320, 324, 326, 328, 330, 332, 334, 336, 338, 340, 342, 344, 346, 348, 350, 352, 354, 356, 358, 360, 362, 364, 366, 368, 370, 372, 374, 376, 378, 380, 382, 384, 386, 388, 390, 392, 394, 396, 398, 400, 402, 404, 406, 408, 410, 412, 414, 416, 418, 420, 422, 424, 426, 428, 430, 432, 434, 436, 1176-1288, 1811-1827, 2015, 2065, 2083, 2152, 2203, and 2209.

[0209] In some embodiments, the isolated nucleic acid comprises an expression construct encoding a miRNA, such as a pri-miRNA, a pre-mRNA, an artificial miRNA, or a mature miRNA, wherein the miRNA comprises a guide strand sequence comprising or consisting of at least 15, 16, 17, 18, 19, 20, 21, or 22 contiguous nucleotides of a sequence of any one of the guide sequences of Tables 1, 3, 9, 11, 12, 13, 19, 23, 24, and 25, e.g., any one of SEQ ID NOS: 4, 6, 8, 10, 12, 14, 16, 18, 20, 22, 24, 26, 28, 30, 32, 34, 36, 38, 40, 42, 44, 46, 48, 50, 52, 54, 56, 58, 60, 62, 64, 66, 68, 70, 72, 74, 76, 78, 80, 82, 84, 86, 88, 90, 92, 94, 96, 98, 100, 102, 104, 106, 108, 110, 112, 114, 116, 118, 120, 124, 126, 128, 130, 132, 134, 136, 138, 140, 142, 144, 146, 148, 150, 152, 154, 156, 158, 160, 162, 164, 166, 168, 170, 172, 174, 176, 178, 180, 182, 184, 186, 188, 190, 192, 194, 196, 198, 200, 202, 204, 206, 208, 210, 212, 214, 216, 218, 220, 222, 224, 226, 228, 230, 232, 234, 236, 238, 240, 242, 244, 246, 248, 250, 252, 254, 256, 258, 260, 262, 264, 266, 268, 270, 272, 274, 276, 278, 280, 282, 284, 286, 288, 290, 292, 294, 296, 298, 300, 302, 304, 306, 308, 310, 312, 314, 316, 318, 320, 324, 326, 328, 330, 332, 334, 336, 338, 340, 342, 344, 346, 348, 350, 352, 354, 356, 358, 360, 362, 364, 366, 368, 370, 372, 374, 376, 378, 380, 382, 384, 386, 388, 390, 392, 394, 396, 398, 400, 402, 404, 406, 408, 410, 412, 414, 416, 418, 420, 422, 424, 426, 428, 430, 432, 434, 436, 1176-1288, 1811-1827, 2015, 2065, 2083, 2152, 2203, and 2209, preferably wherein the guide strand sequence retains positions 2-7 (“seed sequence”) of the selected SEQ ID NO.

[0210] In some embodiments, the isolated nucleic acid comprises an expression construct encoding a miRNA, such as a pri-miRNA, a pre-mRNA, an artificial miRNA, or a mature miRNA, wherein the miRNA comprises a guide strand sequence comprising or consisting of a nucleic acid sequence of any one of the guide sequences of Tables 1, 3, 9, 11, 12, 13, 19, 23, 24, and 25, e.g., any one of SEQ ID NOS: 4, 6, 8, 10, 12, 14, 16, 18, 20, 22, 24, 26, 28, 30, 32, 34, 36, 38, 40, 42, 44, 46, 48, 50, 52, 54, 56, 58, 60, 62, 64, 66, 68, 70, 72, 74, 76, 78, 80, 82, 84, 86, 88, 90, 92, 94, 96, 98, 100, 102, 104, 106, 108, 110, 112, 114, 116, 118, 120, 124, 126, 128, 130, 132, 134, 136, 138, 140, 142, 144, 146, 148, 150, 152, 154, 156, 158, 160, 162, 164, 166, 168, 170, 172, 174, 176, 178, 180, 182, 184, 186, 188, 190, 192, 194, 196, 198, 200, 202, 204, 206, 208, 210, 212, 214, 216, 218, 220, 222, 224, 226, 228, 230, 232, 234, 236, 238, 240, 242, 244, 246, 248, 250, 252, 254, 256, 258, 260, 262, 264, 266, 268, 270, 272, 274, 276, 278, 280, 282, 284, 286, 288, 290, 292, 294, 296, 298, 300, 302, 304, 306, 308, 310, 312, 314, 316, 318, 320, 324, 326, 328, 330, 332, 334, 336, 338, 340, 342, 344, 346, 348, 350, 352, 354, 356, 358, 360, 362, 364, 366, 368, 370, 372, 374, 376, 378, 380, 382, 384, 386, 388, 390, 392, 394, 396, 398, 400, 402, 404, 406, 408, 410, 412, 414, 416, 418, 420, 422, 424, 426, 428, 430, 432, 434, 436, 1176-1288, 1811-1827, 2015, 2065, 2083, 2152, 2203, and 2209, wherein 1, 2, 3, or 4 nucleotides at positions 19-22 differ from the selected SEQ ID NO (variant nucleotide(s)) such that the guide strand sequence is no longer complementary to the ATXN2 target sequence at the variant nucleotide(s).

[0211] In some embodiments, the isolated nucleic acid comprises an expression construct encoding a miRNA, such as a pri-miRNA, a pre-mRNA, an artificial miRNA, or a mature miRNA comprising a guide strand sequence of Table 12. In some embodiments, the isolated nucleic acid comprises an expression construct encoding a miRNA, such as a pri-miRNA, a pre-mRNA, an artificial miRNA, or a mature miRNA comprising a guide strand sequence comprising or consisting of the nucleic acid sequence set forth in any one of SEQ ID NOS: 12, 14, 40, 60, 100, 104, 108, 112, 124, 126, 128, 166, 198, 220, 242, 302, 306, 308, 330, 336, and 362. In some embodiments, the isolated nucleic acid comprises an expression construct encoding a miRNA, such as a pri-miRNA, a pre-mRNA, an artificial miRNA, or a mature miRNA, wherein the miRNA comprises a guide strand sequence comprising or consisting of the nucleic acid sequence set forth in any one of SEQ ID NOS: 12, 14, 40, 60, 100, 104, 108, 112, 124, 126, 128, 166, 198, 220, 242, 302, 306, 308, 330, 336, and 362, with at least 1, 2, 3, 4, or 5 mismatches to the target ATXN2 mRNA sequence. In some embodiments, the isolated nucleic acid comprises an expression construct encoding a miRNA, such as a pri-miRNA, a pre-mRNA, an artificial miRNA, or a mature miRNA, wherein the miRNA comprises a guide strand sequence comprising or consisting of a nucleic acid sequence that is at least 60%, 70%, 75%, 80%, 85%, 90%, 95%, 97%, 99%, or 100% identical to any one of SEQ ID NOS: 12, 14, 40, 60, 100, 104, 108, 112, 124, 126, 128, 166, 198, 220, 242, 302, 306, 308, 330, 336, and 362. In some embodiments, the isolated nucleic acid comprises an expression construct encoding a miRNA, such as a pri-miRNA, a pre-mRNA, an artificial miRNA, or a mature miRNA, wherein the miRNA comprises a guide strand sequence comprising or consisting of at least 15, 16, 17, 18, 19, 20, 21, or 22 contiguous nucleotides of a sequence of any one of SEQ ID NOS: 12, 14, 40, 60, 100, 104, 108, 112, 124, 126, 128, 166, 198, 220, 242, 302, 306, 308, 330, 336, and 362, preferably wherein the guide strand sequence retains positions 2-7 (“seed sequence”) of the selected SEQ ID NO. In some embodiments, the isolated nucleic acid comprises an expression construct encoding a miRNA, such as a pri-miRNA, a pre-mRNA, an artificial miRNA, or a mature miRNA, wherein the miRNA comprises a guide strand sequence comprising or consisting of a sequence of any one of SEQ ID NOS: 12, 14, 40, 60, 100, 104, 108, 112, 124, 126, 128, 166, 198, 220, 242, 302, 306, 308, 330, 336, and 362, wherein 1, 2, 3, or 4 nucleotides at positions 19-22 differ from the selected SEQ ID NO (variant nucleotide(s)) such that the guide strand sequence is no longer complementary to the ATXN2 target sequence at the variant nucleotide(s).

[0212] In some embodiments, the isolated nucleic acid comprises an expression construct encoding a miRNA, such as a pri-miRNA, a pre-mRNA, an artificial miRNA, or a mature miRNA comprising a guide strand sequence of Table 13. In some embodiments, the isolated nucleic acid comprises an expression construct encoding a miRNA, such as a pri-miRNA, a pre-mRNA, an artificial miRNA, or a mature miRNA, comprising a guide strand sequence comprising or consisting of the nucleic acid sequence set forth in any one of SEQ ID NOS: 14, 40, 100, 108, 112, 128, 166, 198, 242, 308, 336, and 362. In some embodiments, the isolated nucleic acid comprises an expression construct encoding a miRNA, such as a pri-miRNA, a pre-mRNA, an artificial miRNA, or a mature miRNA, wherein the miRNA comprises a guide strand sequence comprising or consisting of the nucleic acid sequence set forth in any one of SEQ ID NOS: 14, 40, 100, 108, 112, 128, 166, 198, 242, 308, 336, and 362, with at least 1, 2, 3, 4, or 5 mismatches to the target ATXN2 mRNA sequence. In some embodiments, the miRNA is a pri-miRNA, a pre-mRNA, an artificial miRNA, or a mature miRNA wherein the miRNA comprises a guide strand sequence comprising or consisting of a nucleic acid sequence that is at least 60%, 70%, 75%, 80%, 85%, 90%, 95%, 97%, 99%, or 100% identical to any one of SEQ ID NOS: 14, 40, 100, 108, 112, 128, 166, 198, 242, 308, 336, and 362. In some embodiments, the isolated nucleic acid comprises an expression construct encoding a miRNA, such as a pri-miRNA, a pre-mRNA, an artificial miRNA, or a mature miRNA, wherein the miRNA comprises a guide strand sequence comprising or consisting of at least 15, 16, 17, 18, 19, 20, 21, or 22 contiguous nucleotides of a sequence of any one of SEQ ID NOS: 14, 40, 100, 108, 112, 128, 166, 198, 242, 308, 336, and 362, preferably wherein the guide strand sequence retains positions 2-7 (“seed sequence”) of the selected SEQ ID NO. In some embodiments, the isolated nucleic acid comprises an expression construct encoding a miRNA, such as a pri-miRNA, a pre-mRNA, an artificial miRNA, or a mature miRNA, wherein the miRNA comprises a guide strand sequence comprising or consisting of a sequence of any one of SEQ ID NOS: 14, 40, 100, 108, 112, 128, 166, 198, 242, 308, 336, and 362, wherein 1, 2, 3, or 4 nucleotides at positions 19-22 differ from the selected SEQ ID NO (variant nucleotide(s)), such that the guide strand sequence is no longer complementary to the ATXN2 target sequence at the variant nucleotide(s).

[0213] In some embodiments, the isolated nucleic acid comprises an expression construct encoding a miRNA, such as a pri-miRNA, a pre-mRNA, an artificial miRNA, or a mature miRNA comprising a guide strand sequence of Table 19. In some embodiments, the isolated nucleic acid comprises an expression construct encoding a miRNA, such as a pri-miRNA, a pre-mRNA, an artificial miRNA, or a mature miRNA, comprising a guide strand sequence comprising or consisting of the nucleic acid sequence set forth in any one of SEQ ID NOS:1176-1288, 40, 108, and 166. In some embodiments, the isolated nucleic acid comprises an expression construct encoding a miRNA, such as a pri-miRNA, a pre-mRNA, an artificial miRNA, or a mature miRNA, wherein the miRNA comprises a guide strand sequence comprising or consisting of the nucleic acid sequence set forth in any one of SEQ ID NOS:1176-1288, 40, 108, and 166, with at least 1, 2, 3, 4, or 5 mismatches to the target ATXN2 mRNA sequence. In some embodiments, the miRNA is a pri-miRNA, a pre-mRNA, an artificial miRNA, or a mature miRNA wherein the miRNA comprises a guide strand sequence comprising or consisting of a nucleic acid sequence that is at least 60%, 70%, 75%, 80%, 85%, 90%, 95%, 97%, 99%, or 100% identical to any one of SEQ ID NOS:1176-1288, 40, 108, and 166. In some embodiments, the isolated nucleic acid comprises an expression construct encoding a miRNA, such as a pri-miRNA, a pre-mRNA, an artificial miRNA, or a mature miRNA, wherein the miRNA comprises a guide strand sequence comprising or consisting of at least 15, 16, 17, 18, 19, 20, 21, or 22 contiguous nucleotides of a sequence of any one of SEQ ID NOS:1176-1288, 40, 108, and 166, preferably wherein the guide strand sequence retains positions 2-7 (“seed sequence”) of the selected SEQ ID NO. In some embodiments, the isolated nucleic acid comprises an expression construct encoding a miRNA, such as a pri-miRNA, a pre-mRNA, an artificial miRNA, or a mature miRNA, wherein the miRNA comprises a guide strand sequence comprising or consisting of a sequence of any one of SEQ ID NOS:1176-1288, 40, 108, and 166, wherein 1, 2, 3, or 4 nucleotides at positions 19-22 differ from the selected SEQ ID NO (variant nucleotide(s)), such that the guide strand sequence is no longer complementary to the ATXN2 target sequence at the variant nucleotide(s).

[0214] In some embodiments, the isolated nucleic acid comprises an expression construct encoding a miRNA, such as a pri-miRNA, a pre-mRNA, an artificial miRNA, or a mature miRNA comprising a guide strand sequence of Table 23. In some embodiments, the isolated nucleic acid comprises an expression construct encoding a miRNA, such as a pri-miRNA, a pre-mRNA, an artificial miRNA, or a mature miRNA, comprising a guide strand sequence comprising or consisting of the nucleic acid sequence set forth in any one of SEQ ID NOS:1908-2007. In some embodiments, the isolated nucleic acid comprises an expression construct encoding a miRNA, such as a pri-miRNA, a pre-mRNA, an artificial miRNA, or a mature miRNA, wherein the miRNA comprises a guide strand sequence comprising or consisting of the nucleic acid sequence set forth in any one of SEQ ID NOS:1908-2007, with at least 1, 2, 3, 4, or 5 mismatches to the target ATXN2 mRNA sequence. In some embodiments, the miRNA is a pri-miRNA, a pre-mRNA, an artificial miRNA, or a mature miRNA wherein the miRNA comprises a guide strand sequence comprising or consisting of a nucleic acid sequence that is at least 60%, 70%, 75%, 80%, 85%, 90%, 95%, 97%, 99%, or 100% identical to any one of SEQ ID NOS:1908-2007. In some embodiments, the isolated nucleic acid comprises an expression construct encoding a miRNA, such as a pri-miRNA, a pre-mRNA, an artificial miRNA, or a mature miRNA, wherein the miRNA comprises a guide strand sequence comprising or consisting of at least 15, 16, 17, 18, 19, 20, 21, or 22 contiguous nucleotides of a sequence of any one of SEQ ID NOS: 1908-2007, preferably wherein the guide strand sequence retains positions 2-7 (“seed sequence”) of the selected SEQ ID NO. In some embodiments, the isolated nucleic acid comprises an expression construct encoding a miRNA, such as a pri-miRNA, a pre-mRNA, an artificial miRNA, or a mature miRNA, wherein the miRNA comprises a guide strand sequence comprising or consisting of a sequence of any one of SEQ ID NOS:1908-2007, wherein 1, 2, 3, or 4 nucleotides at positions 19-22 differ from the selected SEQ ID NO (variant nucleotide(s)), such that the guide strand sequence is no longer complementary to the ATXN2 target sequence at the variant nucleotide(s).

[0215] In some embodiments, the isolated nucleic acid comprises an expression construct encoding a miRNA, such as a pri-miRNA, a pre-mRNA, an artificial miRNA, or a mature miRNA comprising a guide strand sequence of Table 24. In some embodiments, the isolated nucleic acid comprises an expression construct encoding a miRNA, such as a pri-miRNA, a pre-mRNA, an artificial miRNA, or a mature miRNA, comprising a guide strand sequence comprising or consisting of the nucleic acid sequence set forth in any one of SEQ ID NOS:100, 112, 166, 202, 246, 306, 308, 314, 1180, 1185, 1196, 1200, 1211, 1213, 1215, 1216, 1224, 1811-1822, 1824-1827, 2015, 2065, 2083, 2152, 2203, and 2209. In some embodiments, the isolated nucleic acid comprises an expression construct encoding a miRNA, such as a pri-miRNA, a pre-mRNA, an artificial miRNA, or a mature miRNA, wherein the miRNA comprises a guide strand sequence comprising or consisting of the nucleic acid sequence set forth in any one of SEQ ID NOS:100, 112, 166, 202, 246, 306, 308, 314, 1180, 1185, 1196, 1200, 1211, 1213, 1215, 1216, 1224, 1811-1822, 1824-1827, 2015, 2065, 2083, 2152, 2203, and 2209, with at least 1, 2, 3, 4, or 5 mismatches to the target ATXN2 mRNA sequence. In some embodiments, the miRNA is a pri-miRNA, a pre-mRNA, an artificial miRNA, or a mature miRNA wherein the miRNA comprises a guide strand sequence comprising or consisting of a nucleic acid sequence that is at least 60%, 70%, 75%, 80%, 85%, 90%, 95%, 97%, 99%, or 100% identical to any one of SEQ ID NOS:100, 112, 166, 202, 246, 306, 308, 314, 1180, 1185, 1196, 1200, 1211, 1213, 1215, 1216, 1224, 1811-1822, 1824-1827, 2015, 2065, 2083, 2152, 2203, and 2209. In some embodiments, the isolated nucleic acid comprises an expression construct encoding a miRNA, such as a pri-miRNA, a pre-mRNA, an artificial miRNA, or a mature miRNA, wherein the miRNA comprises a guide strand sequence comprising or consisting of at least 15, 16, 17, 18, 19, 20, 21, or 22 contiguous nucleotides of a sequence of any one of SEQ ID NOS:100, 112, 166, 202, 246, 306, 308, 314, 1180, 1185, 1196, 1200, 1211, 1213, 1215, 1216, 1224, 1811-1822, 1824-1827, 2015, 2065, 2083, 2152, 2203, and 2209, preferably wherein the guide strand sequence retains positions 2-7 (“seed sequence”) of the selected SEQ ID NO. In some embodiments, the isolated nucleic acid comprises an expression construct encoding a miRNA, such as a pri-miRNA, a pre-mRNA, an artificial miRNA, or a mature miRNA, wherein the miRNA comprises a guide strand sequence comprising or consisting of a sequence of any one of SEQ ID NOS:100, 112, 166, 202, 246, 306, 308, 314, 1180, 1185, 1196, 1200, 1211, 1213, 1215, 1216, 1224, 1811-1822, 1824-1827, 2015, 2065, 2083, 2152, 2203, and 2209, wherein 1, 2, 3, or 4 nucleotides at positions 19-22 differ from the selected SEQ ID NO (variant nucleotide(s)), such that the guide strand sequence is no longer complementary to the ATXN2 target sequence at the variant nucleotide(s).

[0216] In some embodiments, the isolated nucleic acid comprises an expression construct encoding a miRNA, such as a pri-miRNA, a pre-mRNA, an artificial miRNA, or a mature miRNA comprising a guide strand sequence of Table 25. In some embodiments, the isolated nucleic acid comprises an expression construct encoding a miRNA, such as a pri-miRNA, a pre-mRNA, an artificial miRNA, or a mature miRNA, comprising a guide strand sequence comprising or consisting of the nucleic acid sequence set forth in any one of SEQ ID NOS:1185, 1816, 1213, 1819, 2083, 1215, 1216, 1811, and 314. In some embodiments, the isolated nucleic acid comprises an expression construct encoding a miRNA, such as a pri-miRNA, a pre-mRNA, an artificial miRNA, or a mature miRNA, wherein the miRNA comprises a guide strand sequence comprising or consisting of the nucleic acid sequence set forth in any one of SEQ ID NOS:1185, 1816, 1213, 1819, 2083, 1215, 1216, 1811, and 314, with at least 1, 2, 3, 4, or 5 mismatches to the target ATXN2 mRNA sequence. In some embodiments, the miRNA is a pri-miRNA, a pre-mRNA, an artificial miRNA, or a mature miRNA wherein the miRNA comprises a guide strand sequence comprising or consisting of a nucleic acid sequence that is at least 60%, 70%, 75%, 80%, 85%, 90%, 95%, 97%, 99%, or 100% identical to any one of SEQ ID NOS:1185, 1816, 1213, 1819, 2083, 1215, 1216, 1811, and 314. In some embodiments, the isolated nucleic acid comprises an expression construct encoding a miRNA, such as a pri-miRNA, a pre-mRNA, an artificial miRNA, or a mature miRNA, wherein the miRNA comprises a guide strand sequence comprising or consisting of at least 15, 16, 17, 18, 19, 20, 21, or 22 contiguous nucleotides of a sequence of any one of SEQ ID NOS:1185, 1816, 1213, 1819, 2083, 1215, 1216, 1811, and 314, preferably wherein the guide strand sequence retains positions 2-7 (“seed sequence”) of the selected SEQ ID NO. In some embodiments, the isolated nucleic acid comprises an expression construct encoding a miRNA, such as a pri-miRNA, a pre-mRNA, an artificial miRNA, or a mature miRNA, wherein the miRNA comprises a guide strand sequence comprising or consisting of a sequence of any one of SEQ ID NOS:1185, 1816, 1213, 1819, 2083, 1215, 1216, 1811, and 314, wherein 1, 2, 3, or 4 nucleotides at positions 19-22 differ from the selected SEQ ID NO (variant nucleotide(s)), such that the guide strand sequence is no longer complementary to the ATXN2 target sequence at the variant nucleotide(s).

[0217] In some embodiments, the isolated nucleic acid comprises an expression construct encoding a miRNA, such as a pri-miRNA, a pre-mRNA, an artificial miRNA, or a mature miRNA, comprising a guide strand sequence comprising or consisting of the nucleic acid sequence set forth in any one of SEQ ID NOS:1185, 1816, 1213, and 1811. In some embodiments, the isolated nucleic acid comprises an expression construct encoding a miRNA, such as a pri-miRNA, a pre-mRNA, an artificial miRNA, or a mature miRNA, wherein the miRNA comprises a guide strand sequence comprising or consisting of the nucleic acid sequence set forth in any one of SEQ ID NOS:1185, 1816, 1213, and 1811, with at least 1, 2, 3, 4, or 5 mismatches to the target ATXN2 mRNA sequence. In some embodiments, the miRNA is a pri-miRNA, a pre-mRNA, an artificial miRNA, or a mature miRNA wherein the miRNA comprises a guide strand sequence comprising or consisting of a nucleic acid sequence that is at least 60%, 70%, 75%, 80%, 85%, 90%, 95%, 97%, 99%, or 100% identical to any one of SEQ ID NOS: 1185, 1816, 1213, and 1811. In some embodiments, the isolated nucleic acid comprises an expression construct encoding a miRNA, such as a pri-miRNA, a pre-mRNA, an artificial miRNA, or a mature miRNA, wherein the miRNA comprises a guide strand sequence comprising or consisting of at least 15, 16, 17, 18, 19, 20, 21, or 22 contiguous nucleotides of a sequence of any one of SEQ ID NOS:1185, 1816, 1213, and 1811, preferably wherein the guide strand sequence retains positions 2-7 (“seed sequence”) of the selected SEQ ID NO. In some embodiments, the isolated nucleic acid comprises an expression construct encoding a miRNA, such as a pri-miRNA, a pre-mRNA, an artificial miRNA, or a mature miRNA, wherein the miRNA comprises a guide strand sequence comprising or consisting of a sequence of any one of SEQ ID NOS:1185, 1816, 1213, and 1811, wherein 1, 2, 3, or 4 nucleotides at positions 19-22 differ from the selected SEQ ID NO (variant nucleotide(s)), such that the guide strand sequence is no longer complementary to the ATXN2 target sequence at the variant nucleotide(s).

[0218] In some embodiments, the isolated nucleic acid comprises an expression construct encoding an artificial miRNA comprising a guide strand sequence according to any of the embodiments described herein, contained within a miR backbone sequence. In some embodiments, the guide strand sequence and passenger strand sequence of the artificial miRNA are contained with a miRNA backbone sequence. In some embodiments, the miRNA backbone sequence is contained within a miR-155 backbone sequence, a miR-155E backbone sequence, a miR-155M backbone sequence, a miR1-1 backbone sequence, a miR-1-1_M backbone sequence, a miR-100 backbone sequence, a miR-100_M backbone sequence, a miR-190A backbone sequence, a miR-124 backbone sequence, a miR-124_M backbone sequence, a miR-16-2 backbone sequence, a miR-132 backbone sequence, a miR-9 backbone sequence, a miR-138-2 backbone sequence, a miR-122 backbone sequence, a miR-122_M backbone sequence, a miR-130a backbone sequence, a miR-128 backbone sequence, a miR-144 backbone sequence, a miR-451a backbone sequence, or a miR-223 backbone sequence. In some embodiments, the terminal loop, stem, 5′ flanking segment, 3′ flanking segment, or any combination thereof of the miR-155 backbone sequence, miR1-1 backbone sequence, miR-100 backbone sequence, miR-190A backbone sequence, miR-124 backbone sequence, miR-16-2 backbone sequence, miR-132 backbone sequence, miR-9 backbone sequence, miR-138-2 backbone sequence, miR-122 backbone sequence, miR-130a backbone sequence, miR-128 backbone sequence, miR-144 backbone sequence, miR-451a backbone sequence, or miR-223 backbone sequence is modified (e.g., nucleotide insertion, deletion, substitution, mismatch, wobble, or any combination thereof).

[0219] In some embodiments, the isolated nucleic acid comprises an expression construct encoding a miRNA (pri-miRNA, a pre-mRNA, an artificial miRNA, or a mature miRNA) comprising a guide strand sequence and corresponding passenger strand sequence comprising or consisting of any one of the duplex sequences set forth in Tables 1, 19, 23, and 24. In some embodiments, the passenger strand sequence of the miRNA comprises a sequence that is 100% complementary or perfectly complementary to the guide strand sequence. For example, the encoded guide strand sequence may comprise of consist of a sequence of SEQ ID NO: 4, 6, 8, 10, 12, 14, 16, 18, 20, 22, 24, 26, 28, 30, 32, 34, 36, 38, 40, 42, 44, 46, 48, 50, 52, 54, 56, 58, 60, 62, 64, 66, 68, 70, 72, 74, 76, 78, 80, 82, 84, 86, 88, 90, 92, 94, 96, 98, 100, 102, 104, 106, 108, 110, 112, 114, 116, 118, 120, 124, 126, 128, 130, 132, 134, 136, 138, 140, 142, 144, 146, 148, 150, 152, 154, 156, 158, 160, 162, 164, 166, 168, 170, 172, 174, 176, 178, 180, 182, 184, 186, 188, 190, 192, 194, 196, 198, 200, 202, 204, 206, 208, 210, 212, 214, 216, 218, 220, 222, 224, 226, 228, 230, 232, 234, 236, 238, 240, 242, 244, 246, 248, 250, 252, 254, 256, 258, 260, 262, 264, 266, 268, 270, 272, 274, 276, 278, 280, 282, 284, 286, 288, 290, 292, 294, 296, 298, 300, 302, 304, 306, 308, 310, 312, 314, 316, 318, 320, 324, 326, 328, 330, 332, 334, 336, 338, 340, 342, 344, 346, 348, 350, 352, 354, 356, 358, 360, 362, 364, 366, 368, 370, 372, 374, 376, 378, 380, 382, 384, 386, 388, 390, 392, 394, 396, 398, 400, 402, 404, 406, 408, 410, 412, 414, 416, 418, 420, 422, 424, 426, 428, 430, 432, 434, or 436 (guide sequences in Table 1), and the encoded passenger strand sequence may comprise or consist of a sequence of SEQ ID NO: 3, 5, 7, 9, 11, 13, 15, 17, 19, 21, 23, 25, 27, 29, 31, 33, 35, 37, 39, 41, 43, 45, 47, 49, 51, 53, 55, 57, 59, 61, 63, 65, 67, 69, 71, 73, 75, 77, 79, 81, 83, 85, 87, 89, 91, 93, 95, 97, 99, 101, 103, 105, 107, 109, 111, 113, 115, 117, 119, 121, 123, 125, 127, 129, 131, 133, 135, 137, 139, 141, 143, 145, 147, 149, 151, 153, 155, 157, 159, 161, 163, 165, 167, 169, 171, 173, 175, 177, 179, 181, 183, 185, 187, 189, 191, 193, 195, 197, 199, 201, 203, 205, 207, 209, 211, 213, 215, 217, 219, 221, 223, 225, 227, 229, 231, 233, 235, 237, 239, 241, 243, 245, 247, 249, 251, 253, 255, 257, 259, 261, 263, 265, 267, 269, 271, 273, 275, 277, 279, 281, 283, 285, 287, 289, 291, 293, 295, 297, 299, 301, 303, 305, 307, 309, 311, 313, 315, 317, 319, 321, 323, 325, 327, 329, 331, 333, 335, 337, 339, 341, 343, 345, 347, 349, 351, 353, 355, 357, 359, 361, 363, 365, 367, 369, 371, 373, 375, 377, 379, 381, 383, 385, 387, 389, 391, 393, 395, 397, 399, 401, 403, 405, 407, 409, 411, 413, 415, 417, 419, 421, 423, 425, 427, 429, 431, 433, or 435, respectively (passenger sequences in Table 1). In some embodiments, the passenger strand sequence of the miRNA is not 100% complementary or to the guide strand sequence. For example, a guide strand sequence may comprise or consist of a sequence of SEQ ID NO: 1176 and the corresponding passenger strand sequence may comprise or consist of a sequence of SEQ ID NO:1289 (see, Table 19).

[0220] In some embodiments, the isolated nucleic acid comprises an expression construct encoding a miRNA (pri-miRNA, a pre-mRNA, an artificial miRNA, or a mature miRNA) comprising a guide strand sequence comprising or consisting of any one of SEQ ID NOS: 12, 14, 40, 60, 100, 104, 108, 112, 124, 126, 128, 166, 198, 220, 242, 302, 306, 308, 330, 336, and 362, and a passenger strand sequence of comprising a sequence that is 100% complementary or perfectly complementary to the guide strand sequence. For example, the encoded guide strand sequence may comprise or consist of a sequence of SEQ ID NO: 12, 14, 40, 60, 100, 104, 108, 112, 124, 126, 128, 166, 198, 220, 242, 302, 306, 308, 330, 336, or 362, and the encoded passenger strand sequence may comprise or consist of a sequence of SEQ ID NO: 11, 13, 39, 59, 99, 103, 107, 111, 123, 125, 127, 165, 197, 219, 241, 301, 305, 307, 329, 335, or 361, respectively.

[0221] In some embodiments, the isolated nucleic acid comprises an expression construct encoding a miRNA (pri-miRNA, a pre-mRNA, an artificial miRNA, or a mature miRNA) wherein the miRNA comprises a guide strand sequence comprising or consisting of any one of SEQ ID NOS: 14, 40, 100, 108, 112, 128, 166, 198, 242, 308, 336, and 362, and a passenger strand sequence comprising a sequence that is 100% complementary or perfectly complementary to the guide strand. For example, the encoded guide strand sequence may comprise or consist of a sequence of SEQ ID NO: 14, 40, 100, 108, 112, 128, 166, 198, 242, 308, 336, or 362, and the encoded passenger strand sequence may comprise or consisting of a sequence of SEQ ID NO: 13, 39, 99, 107, 111, 127, 165, 197, 241, 307, 335, or 361, respectively.

[0222] In some embodiments, the isolated nucleic acid comprises an expression construct encoding a miRNA (pri-miRNA, a pre-mRNA, an artificial miRNA, or a mature miRNA), wherein the miRNA comprises a guide strand sequence comprising or consisting of any one of the guide sequences of Tables 1, 19, 23, and 24, and the passenger strand sequence comprises or consists of a corresponding passenger sequence of Tables 1, 19, 23, and 24 that has 1, 2, 3, 4, 5, 6, 7, 8, 9, 10, or more insertions, deletions, substitutions, mismatches, wobbles, or any combination thereof relative to the passenger strand sequence of Tables 1, 19, 23, and 24. In some embodiments, the isolated nucleic acid comprises an expression construct encoding a miRNA (pri-miRNA, a pre-mRNA, an artificial miRNA, or a mature miRNA), wherein the miRNA comprises a guide strand sequence comprising or consisting of any one of SEQ ID NOs: 4, 6, 8, 10, 12, 14, 16, 18, 20, 22, 24, 26, 28, 30, 32, 34, 36, 38, 40, 42, 44, 46, 48, 50, 52, 54, 56, 58, 60, 62, 64, 66, 68, 70, 72, 74, 76, 78, 80, 82, 84, 86, 88, 90, 92, 94, 96, 98, 100, 102, 104, 106, 108, 110, 112, 114, 116, 118, 120, 124, 126, 128, 130, 132, 134, 136, 138, 140, 142, 144, 146, 148, 150, 152, 154, 156, 158, 160, 162, 164, 166, 168, 170, 172, 174, 176, 178, 180, 182, 184, 186, 188, 190, 192, 194, 196, 198, 200, 202, 204, 206, 208, 210, 212, 214, 216, 218, 220, 222, 224, 226, 228, 230, 232, 234, 236, 238, 240, 242, 244, 246, 248, 250, 252, 254, 256, 258, 260, 262, 264, 266, 268, 270, 272, 274, 276, 278, 280, 282, 284, 286, 288, 290, 292, 294, 296, 298, 300, 302, 304, 306, 308, 310, 312, 314, 316, 318, 320, 324, 326, 328, 330, 332, 334, 336, 338, 340, 342, 344, 346, 348, 350, 352, 354, 356, 358, 360, 362, 364, 366, 368, 370, 372, 374, 376, 378, 380, 382, 384, 386, 388, 390, 392, 394, 396, 398, 400, 402, 404, 406, 408, 410, 412, 414, 416, 418, 420, 422, 424, 426, 428, 430, 432, 434, 436, and a passenger strand sequence comprising or consisting of a sequence that has 1, 2, 3, 4, 5, 6, 7, 8, 9, 10, or more insertions, deletions, substitutions, mismatches, wobbles, or any combination thereof relative to the corresponding passenger strand sequence of SEQ ID NOS: 3, 5, 7, 9, 11, 13, 15, 17, 19, 21, 23, 25, 27, 29, 31, 33, 35, 37, 39, 41, 43, 45, 47, 49, 51, 53, 55, 57, 59, 61, 63, 65, 67, 69, 71, 73, 75, 77, 79, 81, 83, 85, 87, 89, 91, 93, 95, 97, 99, 101, 103, 105, 107, 109, 111, 113, 115, 117, 119, 121, 123, 125, 127, 129, 131, 133, 135, 137, 139, 141, 143, 145, 147, 149, 151, 153, 155, 157, 159, 161, 163, 165, 167, 169, 171, 173, 175, 177, 179, 181, 183, 185, 187, 189, 191, 193, 195, 197, 199, 201, 203, 205, 207, 209, 211, 213, 215, 217, 219, 221, 223, 225, 227, 229, 231, 233, 235, 237, 239, 241, 243, 245, 247, 249, 251, 253, 255, 257, 259, 261, 263, 265, 267, 269, 271, 273, 275, 277, 279, 281, 283, 285, 287, 289, 291, 293, 295, 297, 299, 301, 303, 305, 307, 309, 311, 313, 315, 317, 319, 321, 323, 325, 327, 329, 331, 333, 335, 337, 339, 341, 343, 345, 347, 349, 351, 353, 355, 357, 359, 361, 363, 365, 367, 369, 371, 373, 375, 377, 379, 381, 383, 385, 387, 389, 391, 393, 395, 397, 399, 401, 403, 405, 407, 409, 411, 413, 415, 417, 419, 421, 423, 425, 427, 429, 431, 433, 435 respectively. In some embodiments, a mismatch is a G→C, C→G, A→T, or T→A conversion in the encoded passenger strand sequence. In some embodiments, a mismatch (to create a bulge with the guide strand) is a G→T, C→A, A→C, or T→G conversion in the encoded passenger strand sequence. In some embodiments, a wobble is a G-U wobble, wherein a C is converted to a T in the encoded passenger strand sequence. In some embodiments, the passenger strand sequence is modified according to the rules of Table 8.

[0223] In some embodiments, the isolated nucleic acid comprises an expression construct encoding a miRNA (pri-miRNA, a pre-mRNA, an artificial miRNA, or a mature miRNA) wherein the miRNA comprises a guide strand sequence comprising or consisting of any one of SEQ ID NOS: 12, 14, 40, 60, 100, 104, 108, 112, 124, 126, 128, 166, 198, 220, 242, 302, 306, 308, 330, 336, and 362, and a passenger strand sequence comprising or consisting of a sequence that has 1, 2, 3, 4, 5, 6, 7, 8, 9, 10, or more insertions, deletions, substitutions, mismatches, wobbles, or any combination thereof, relative to the passenger strand sequence comprising or consisting of SEQ ID NOS: 11, 13, 39, 59, 99, 103, 107, 11, 123, 125, 127, 165, 197, 219, 241, 301, 305, 307, 329, 335, and 361, respectively. In some embodiments, a mismatch is a G→C, C→G, A→T, or T→A conversion in the passenger strand sequence. In some embodiments, a mismatch (to create a bulge with the guide strand) is a G→T, C→A, A→C, or T→G conversion in the passenger strand sequence. In some embodiments, a wobble is a G-U wobble, wherein a C is converted to a T in the passenger strand sequence. In some embodiments, the passenger strand sequence is modified according to the rules of Table 8.

[0224] In some embodiments, the isolated nucleic acid comprises an expression construct encoding a miRNA (pri-miRNA, a pre-mRNA, an artificial miRNA, or a mature miRNA) wherein the miRNA comprises a guide strand sequence comprising or consisting of any one of SEQ ID NOS: 14, 40, 100, 108, 112, 128, 166, 198, 242, 308, 336, and 362, and a passenger strand sequence comprising a sequence that has 1, 2, 3, 4, 5, 6, 7, 8, 9, 10, or more insertions, deletions, substitutions, mismatches, wobbles, or any combination thereof relative to the passenger strand sequence comprising or consisting of SEQ ID NOS: 13, 39, 99, 107, 111, 127, 165, 197, 241, 307, 335, and 361, respectively. In some embodiments, a mismatch is a G→C, C→G, A→T, or T→A conversion in the encoded passenger strand sequence. In some embodiments, a mismatch (to create a bulge with the guide strand) is a G→T, C→A, A→C, or T→G conversion in the encoded passenger strand sequence. In some embodiments, a wobble is a G-U wobble, wherein a C is converted to a T in the encoded passenger strand sequence. In some embodiments, the passenger strand sequence is modified according to the rules of Table 8.

[0225] In some embodiments, the isolated nucleic acid comprises an expression construct encoding an artificial miRNA comprising a guide strand sequence according to any of the embodiments described herein, contained within a miR-155M backbone sequence, miR-155E backbone sequence, miR1-1 backbone sequence, miR-100 backbone sequence, miR-124 backbone sequence, mIR-138-2 backbone sequence, miR-122 backbone sequence, miR-128 backbone sequence, miR-130a backbone sequence, or miR-16-2 backbone sequence, wherein the artificial miRNA comprises a passenger strand sequence that is modified according to Table 8. In some embodiments, the passenger strand sequence comprises a mismatch, wherein a mismatch is a G→C, C→G, A→T, or T→A conversion in the passenger strand sequence; a mismatch (to create a bulge with the guide strand) is a G→T, C→A, A→C, or T→G conversion in the passenger strand sequence; and a wobble is a G-U wobble, wherein a C is converted to a T in the passenger strand sequence.

[0226] In some embodiments, the isolated nucleic acid comprises an expression construct encoding an artificial miRNA comprising or consisting of a nucleic acid sequence set forth in any one of Tables 3, 9, 11, 1923, 24, and 25. In some embodiments, the isolated nucleic acid comprises an expression construct encoding an artificial miRNA comprising or consisting of any one of SEQ ID NOS: 443-490, 1109-1111, 1114, 1121-1168, 1405-1520, 1908-2007, 2011, 2017, 2021, 2025, 2027, 2031, 2035, 2039, 2041, 2045, 2049, 2053, 2057, 2061, 2067, 2071, 2075, 2079, 2085, 2089, 2093, 2097, 2101, 2105, 2109, 2113, 2117, 2120, 2124, 2128, 2132, 2136, 2140, 2144, 2148, 2154, 2158, 2162, 2166, 2170, 2174, 2176, 2180, 2182, 2184, 2187, 2189, 2191, 2193, 2195, 2197, 2199, 2205, 2211, 2261, 2263, 2265, and 2267.

[0227] In some embodiments, the isolated nucleic acid comprises an expression construct encoding an artificial miRNA that comprises or consists of a nucleic acid sequence set forth in Table 3. In some embodiments, the isolated nucleic acid comprises an expression construct encoding an artificial miRNA that comprises or consists of a nucleic acid sequence of any one of SEQ ID NOS:443-490.

[0228] In some embodiments, the isolated nucleic acid comprises an expression construct encoding an artificial miRNA that comprises or consists of a nucleic acid sequence set forth in Table 9. In some embodiments, the isolated nucleic acid comprises an expression construct encoding an artificial miRNA that comprises or consists of a nucleic acid sequence of any one of SEQ ID NOS:1109-1111, and 1114.

[0229] In some embodiments, the isolated nucleic acid comprises an expression construct encoding an artificial miRNA that comprises or consists of a nucleic acid sequence set forth in Table 11. In some embodiments, the isolated nucleic acid comprises an expression construct encoding an artificial miRNA that comprises or consists of a nucleic acid sequence of any one of SEQ ID NOS:1121-1168.

[0230] In some embodiments, the isolated nucleic acid comprises an expression construct encoding an artificial miRNA that comprises or consists of a nucleic acid sequence set forth in Table 19. In some embodiments, the isolated nucleic acid comprises an expression construct encoding an artificial miRNA that comprises or consists of a nucleic acid sequence of any one of SEQ ID NOS:1405-1520.

[0231] In some embodiments, the isolated nucleic acid comprises an expression construct encoding an artificial miRNA that comprises or consists of a nucleic acid sequence set forth in Table 23. In some embodiments, the isolated nucleic acid comprises an expression construct encoding an artificial miRNA that comprises or consists of a nucleic acid sequence of any one of SEQ ID NOS:1908-2007.

[0232] In some embodiments, the isolated nucleic acid comprises an expression construct encoding an artificial miRNA that comprises or consists of a nucleic acid sequence set forth in Table 24. In some embodiments, the isolated nucleic acid comprises an expression construct encoding an artificial miRNA that comprises or consists of a nucleic acid sequence of any one of SEQ ID NOS:1908-1934, 1936-1977, 1979-1982, 1984-1994, 1997, 1998, 2000, 2001, 2005-2007, 2011, 2017, 2021, 2025, 2027, 2031, 2035, 2039, 2041, 2045, 2049, 2053, 2057, 2061, 2067, 2071, 2075, 2079, 2085, 2089, 2093, 2097, 2101, 2105, 2109, 2113, 2117, 2120, 2124, 2128, 2132, 2136, 2140, 2144, 2148, 2154, 2158, 2162, 2166, 2170, 2174, 2176, 2180, 2182, 2184, 2187, 2189, 2191, 2193, 2195, 2197, 2199, 2205, 2211, 2261, 2263, 2265, and 2267.

[0233] In some embodiments, the isolated nucleic acid comprises an expression construct encoding an artificial miRNA that comprises or consists of a nucleic acid sequence set forth in Table 25. In some embodiments, the isolated nucleic acid comprises an expression construct encoding an artificial miRNA that comprises or consists of a nucleic acid sequence of any one of SEQ ID NOS:1915, 1982, 1965, 1937, 1985, 1921, and 2021.

[0234] In some embodiments, expression constructs encoding the inhibitory nucleic acids that target ATXN2 mRNA comprises or consists of any of the guide strand sequences or artificial miRNA sequences disclosed in DNA format. For example, Tables 9, 11, 23, and 24 provide amiRNA sequences in DNA format, which DNA sequence may be inserted into expression constructs. Alternatively, amiRNA sequences provided herein can be converted to DNA format by replacing each “U” nucleotide with a “T” nucleotide.

[0235] In some embodiments, the expression construct encodes two or more inhibitory nucleic acids that target an ATXN2 mRNA transcript described herein. In some embodiments, the expression construct encodes an inhibitory nucleic acid that targets ATXN2 transcript and an inhibitory nucleic acid that targets a second target transcript other than ATXN2. In some embodiments, the second target transcript is C9ORF72. Examples of inhibitory nucleic acids targeting C9ORF72 are described in US Patent Publication US2019/0316126 (incorporated by reference in its entirety). In some embodiments, the expression construct encodes an inhibitory nucleic acid that targets ATXN2 transcript and encodes a therapeutic polypeptide or protein.

[0236] In some embodiments, the expression construct is monocistronic. In some embodiments, the expression construct is polycistronic (e.g., expression construct encodes two or more peptides or polypeptides). In some embodiments, a nucleic acid sequence encoding a first gene product (e.g., inhibitory nucleic acid targeting ATXN2 mRNA) and a nucleic acid sequence encoding a second gene product within an expression construct are separated by an internal ribosome entry site (IRES), furin cleavage site, or viral 2A peptide. In some embodiments, a viral 2A peptide is a porcine teschovirus-1 (P2A), Thosea asigna virus (T2A), equine rhinitis A virus (E2A), foot-and-mouth disease virus (F2A), B. mori cytoplasmic polyhedrosis virus (BmCPV 2A), B. mori flacherie virus (BmIFV 2A), or variant thereof.

[0237] In some embodiments, the expression construct further comprises one or more expression control sequences (regulatory sequences) operably linked with the transgene (e.g., nucleic acid encoding an artificial miRNA). “Operably linked” sequences include expression control sequences that are contiguous with the transgene or act in trans or at a distance from the transgene to control its expression. Examples of expression control sequences include transcription initiation sequences, termination sequences, promoter sequences, enhancer sequences, repressor sequences, splice site sequences, polyadenylation (polyA) signal sequences, or any combination thereof.

[0238] In some embodiments, a promoter is an endogenous promoter, synthetic promoter, constitutive promoter, inducible promoter, tissue-specific promoter (e.g., CNS-specific), or cell-specific promoter (neurons, glial cells, or astrocytes). Examples of constitutive promoters include, Rous sarcoma virus (RSV) LTR promoter (optionally with the RSV enhancer), cytomegalovirus (CMV) promoter (optionally with the CMV enhancer), SV40 promoter, and dihydrofolate reductase promoter. Examples of inducible promoters include zinc-inducible sheep metallothionine (MT) promoter, dexamethasone (Dex)-inducible mouse mammary tumor virus (MMTV) promoter, T7 polymerase promoter system, the ecdysone insect promoter, tetracycline-repressible system, tetracycline-inducible system, RU486-inducible system, and the rapamycin-inducible system. Further examples of promoters that may be used include, for example, chicken beta-actin promoter (CBA promoter), a CAG promoter, a H1 promoter, a CD68 promoter, a JeT promoter, synapsin promoter, RNA pol II promoter, or a RNA pol III promoter (e.g., U6, H1, etc.). In some embodiments, the promoter is a tissue-specific RNA pol II promoter. In some embodiments, the tissue-specific RNA pol II promoter is derived from a gene that exhibits neuron-specific expression. In some embodiments, the neuron-specific promoter is a synapsin 1 promoter or synapsin 2 promoter.

[0239] In some embodiments, the promoter is an H1 promoter comprising or consisting of the sequence set forth in nucleotides 113-203 of SEQ ID NO:1522. In some embodiments, the promoter is an H1 promoter comprising or consisting of the sequence set forth in nucleotides 1798-1888 of SEQ ID NO:1521. In some embodiments, the promoter is an H1 promoter comprising or consisting of the sequence set forth in nucleotides 113-343 of any one of SEQ ID NOS:2257-2260. In some embodiments, the promoter is an H1 promoter comprising or consisting of the sequence set forth in nucleotides 244-343 of any one of SEQ ID NOS:2257-2260.

[0240] In some embodiments, the sequence encoding the inhibitory nucleic acid of the present disclosure is positioned in an untranslated region of an expression construct. In some embodiments, the sequence encoding the inhibitory nucleic acid of the present disclosure is positioned in an intron, a 5′ untranslated region (5′UTR), or a 3′ untranslated region (3′UTR) of the expression construct. In some embodiments, the sequence encoding the inhibitory nucleic acid of the present disclosure is positioned in an intron downstream of the promoter and upstream of an expressed gene.

[0241] In some embodiments, the isolated nucleic acid comprises an expression construct encoding an inhibitory nucleic, flanked by two AAV inverted terminal repeats (ITRs) (e.g., 5′ ITR and 3′ ITR). In some embodiments, each AAV ITR is a full length ITR (e.g., approximately 145 bp in length, and containing functional Rep binding site (RBS) and terminal resolution site (trs)). In some embodiments, one of the ITRs is truncated (e.g., shortened or not full-length). In some embodiments, a truncated ITR lacks a functional terminal resolution site (trs) and is used for production of self-complementary AAV vectors (scAAV vectors). In some embodiments, a truncated ITR is a truncated version of AAV2 ITR referred to as AITR (D-sequence and TRS are deleted). In some embodiments, the ITRs are selected from AAV serotypes of AAV1, AAV2, AAV3, AAV4, AAV5, AAV6, AAV7, AAV8, AAV9, AAV9.47, AAV9(hu14), AAV10, AAV11, AAV 12, AAVrh8, AAVrh10, AAV-DJ8, AAV-DJ, AAV-PUP.A, AAV-PHP.B, AAVPHP.B2, AAVPHP.B3, AAVPHP.N/PHP.B-DGT, AAVPHP.B-EST, AAVPHP.B-GGT, AAVPHP.B-ATP, AAVPHP.B-ATT-T, AAVPHP.B-DGT-T, AAVPHP.B-GGT-T, AAVPHP.B-SGS, AAVPHP.B-AQP, AAVPHP.B-QQP, AAVPHP.B-SNP(3), AAVPHP.B-SNP, AAVPHP.B-QGT, AAVPHP.B-NQT, AAVPHP.B-EGS, AAVPHP.B-SGN, AAVPHP.B-EGT, AAVPHP.B-DST, AAVPHP.B-DST, AAVPHP.B-STP, AAVPHP.B-PQP, AAVPHP.B-SQP, AAVPHP.B-QLP, AAVPHP.B-TMP, AAVPHP.B-TTP, AAVPHP.S/G2A12, AAVG2A 15/G2A3, AAVG2B4, AAVG2B5, and variants thereof.

[0242] In some embodiments, the isolated nucleic acid molecule comprising an expression construct encoding an inhibitory nucleic acid that inhibits expression or activity of ATXN2 comprises the nucleotide sequence set forth in any one of SEQ ID NOS:2257-2260. In some embodiments, the isolated nucleic acid molecule comprising an expression construct encoding an inhibitory nucleic acid that inhibits expression or activity of ATXN2 comprises the nucleotide sequence set forth in SEQ ID NO:2257. In some embodiments, the isolated nucleic acid molecule comprising an expression construct encoding an inhibitory nucleic acid that inhibits expression or activity of ATXN2 comprises the nucleotide sequence set forth in SEQ ID NO:2258. In some embodiments, the isolated nucleic acid molecule comprising an expression construct encoding an inhibitory nucleic acid that inhibits expression or activity of ATXN2 comprises the nucleotide sequence set forth in SEQ ID NO:2259. In some embodiments, the isolated nucleic acid molecule comprising an expression construct encoding an inhibitory nucleic acid that inhibits expression or activity of ATXN2 comprises the nucleotide sequence set forth in SEQ ID NO:2260.

[0243] Additional isolated nucleic acid molecules comprising an expression construct encoding an inhibitory nucleic acid that inhibits expression or activity of ATXN2 may be constructed using the nucleotide sequence set forth in any one of SEQ ID NOS:2257-2260, by substituting the desired inhibitory nucleic acid sequence (e.g., artificial miRNA cassette) of the present disclosure into nucleotide positions 344-481 of any one of SEQ ID NOS:2257-2260.

### Vectors and Host Cells

[0244] Inhibitory nucleic acid molecules (siRNAs, shRNAs, miRNAs) described herein can be encoded by vectors. The use of vectors, e.g., AAV, for expressing inhibitory nucleic acids of the present disclosure may allow for continual or controlled expression of inhibitory nucleic acid in the subject, rather than multiple doses of isolated inhibitory nucleic acids to the subject. The present disclosure provides a vector comprising an isolated nucleic acid comprising an expression construct encoding an inhibitory nucleic described herein. A vector can be a plasmid, cosmid, phagemid, bacterial artificial chromosome (BAC) or viral vector. Examples of viral vectors include herpesvirus (HSV) vectors, retroviral vectors, adenoviral vectors, adeno-associated viral (AAV) vectors, lentiviral vectors, baculoviral vectors, and the like. In some embodiments, a retroviral vector is a mouse stem cell virus, murine leukemia virus (e.g. Moloney murine leukemia virus vector), feline leukemia virus, feline sarcoma virus, or avian reticuloendotheliosis virus vector. In some embodiments, a lentiviral vector is a HIV (human immunodeficiency virus, including HIV type 1 and HIV type 2, equine infectious anemia virus, feline immunodeficiency virus (FIV), bovine immune deficiency virus (BIV), and simian immunodeficiency virus (SIV), equine infectious anemia virus, or Maedi-Visna viral vector.

[0245] In some embodiments, the vector is an AAV (AAV) vector, such as a recombinant AAV (rAAV) vector, which is produced by recombinant methods. AAV is a single-stranded, non-enveloped DNA virus having a genome that encodes proteins for replication (rep) and the capsid (Cap), flanked by two ITRs, which serve as the origin of replication of the viral genome. AAV also contains a packaging sequence, allowing packaging of the viral genome into an AAV capsid. A recombinant AAV vector (rAAV) may be obtained from the wild type genome of AAV by using molecular methods to remove the all or part of the wild type genome (e.g., Rep, Cap) from the AAV, and replacing with a non-native nucleic acid, such as a heterologous nucleic acid sequence (e.g., a nucleic acid molecule encoding an inhibitory nucleic acid). Typically, for AAV one or both inverted terminal repeat (ITR) sequences are retained in the AAV vector. In some embodiments, the rAAV vector comprises an expression construct encoding an inhibitory nucleic acid of the present disclosure flanked by two cis-acting AAV ITRs (5′ ITR and 3′ ITR). Functional ITR sequences are necessary for the rescue, replication and packaging of the AAV viral particle. Thus, an AAV vector is defined herein to include at least those sequences required in cis for replication and packaging (e.g., functional ITRs) of the virus. In some embodiments, each AAV ITR is a full length ITR (e.g., approximately 145 bp in length, and containing functional Rep binding site (RBS) and terminal resolution site (trs)). In some embodiments, one or both of the ITRs is is modified, e.g., by insertion, deletion, or substitution, provided that the ITRs provide for functional rescue, replication, and packaging. In some embodiments, a modified ITR lacks a functional terminal resolution site (trs) and is used for production of self-complementary AAV vectors (scAAV vectors). In some embodiments, a modified ITR is a truncated version of AAV2 ITR referred to as AITR (D-sequence and TRS are deleted).

[0246] In some embodiments, the AAV vector comprises a 5′ ITR comprising or consisting of nucleotides 1-106 of any one of SEQ ID NOS:2257-2260. In some embodiments, the AAV vector comprises a 3′ ITR comprising or consisting of nucleotides 2192-2358 of any one of SEQ ID NOS:2257-2260. In some embodiments, the AAV vector comprises: a 5′ ITR comprising or consisting of nucleotides 1-106 of SEQ ID NO:2257 and a 3′ ITR comprising or consisting of nucleotides 2192-2358 of SEQ ID NO:2257; a 5′ ITR comprising or consisting of nucleotides 1-106 of SEQ ID NO:2258 and a 3′ ITR comprising or consisting of nucleotides 2192-2358 of SEQ ID NO:2258; a 5′ ITR comprising or consisting of nucleotides 1-106 of SEQ ID NO:2259 and a 3′ ITR comprising or consisting of nucleotides 2192-2358 of SEQ ID NO:2259; or a 5′ ITR comprising or consisting of nucleotides 1-106 of SEQ ID NO:2260 and a 3′ ITR comprising or consisting of nucleotides 2192-2358 of SEQ ID NO:2260.

[0247] In some embodiments, the rAAV vector is a mammalian serotype AAV vector (e.g., AAV genome and ITRs derived from mammalian serotype AAV), including a primate serotype AAV vector or human serotype AAV vector. In some embodiments, the AAV vector is a chimeric AAV vector. In some embodiments, the ITRs are selected from AAV serotypes of AAV1, AAV2, AAV3, AAV4, AAV5, AAV6, AAV7, AAV8, AAV9, AAV9.47, AAV9(hu14), AAV10, AAV11, AAV 12, AAVrh8, AAVrh10, AAV-DJ8, AAV-DJ, AAV-PUPA, AAV-PHP.B, AAVPHP.B2, AAVPHP.B3, AAVPHP.N/PHP.B-DGT, AAVPHP.B-EST, AAVPHP.B-GGT, AAVPHP.B-ATP, AAVPHP.B-ATT-T, AAVPHP.B-DGT-T, AAVPHP.B-GGT-T, AAVPHP.B-SGS, AAVPHP.B-AQP, AAVPHP.B-QQP, AAVPHP.B-SNP(3), AAVPHP.B-SNP, AAVPHP.B-QGT, AAVPHP.B-NQT, AAVPHP.B-EGS, AAVPHP.B-SGN, AAVPHP.B-EGT, AAVPHP.B-DST, AAVPHP.B-DST, AAVPHP.B-STP, AAVPHP.B-PQP, AAVPHP.B-SQP, AAVPHP.B-QLP, AAVPHP.B-TMP, AAVPHP.B-TTP, AAVPHP.S/G2A12, AAVG2A 15/G2A3, AAVG2B4, AAVG2B5, and variants thereof.

[0248] Other expression control sequences may be present in the rAAV vector operably linked to the inhibitory nucleic acid, including one or more of transcription initiation sequences, termination sequences, promoter sequences, enhancer sequences, repressor sequences, splice site sequences, polyadenylation (polyA) signal sequences, or any combination thereof.

[0249] AAV preferentially packages a full-length genome, i.e., one that is approximately the same size as the native genome, and is not too big or too small. However, expression cassettes encoding inhibitory nucleic acid sequences are rather small. To avoid packaging of fragmented genomes, a stuffer sequence may be linked to an expression construct encoding inhitory nucleic acids of the present disclosure and flanked by the 5′ ITR and 3′ ITR to expand the packagable genome, resulted in a genome whose size was near-normal in length between the ITRs. In some embodiments, the rAAV vector comprising a stuffer sequence and expression cassette encoding an inhibitory nucleic acid sequence of the present disclosure has a total length of about 4.7 kb between the 5′ ITR and 3′ ITR. In some embodiments, the rAAV vector is a self-complementary rAAV vector comprising a stuffer sequence and expression cassette encoding an inhibitory nucleic acid sequence of the present disclosure and has a total length of about 2.4 kb between the 5′ ITR and 3′ ITR. An exemplary stuffer sequence for use in the rAAV vectors of the present disclosure includes a sequence comprising or consisting of nucleotides 348-2228 of SEQ ID NO:1522 and a sequence comprising or consisting of nucleotides 489-2185 of any one of SEQ ID NOS:2257-2260.

[0250] rAAV vectors may have one or more AAV wild type genes deleted in whole or in part. In some embodiments the rAAV vector is replication defective. In some embodiments, the rAAV vector lacks a functional Rep protein and/or capsid protein. In some embodiments, the rAAV vector is a self-complementary AAV (scAAV) vector.

[0251] In some embodiments, the rAAV vector comprises from 5′ ITR to 3′ ITR the nucleotide sequence set forth in any one of SEQ ID NOS:2257-2260. In some embodiments, the rAAV vector comprises from 5′ ITR to 3′ ITR the nucleotide sequence set forth in SEQ ID NO:2257. In some embodiments, the rAAV vector comprises from 5′ ITR to 3′ ITR the nucleotide sequence set forth in SEQ ID NO:2258. In some embodiments, the rAAV vector comprises from 5′ ITR to 3′ ITR the nucleotide sequence set forth in SEQ ID NO:2259. In some embodiments, the rAAV vector comprises the nucleotide sequence set forth in SEQ ID NO:2260.

[0252] Recombinant AAV vectors of the present disclosure may be encapsidated by one or more AAV capsid proteins to form a rAAV particle. A “rAAV particle” or “rAAV virion” refers to an infectious, replication-defective virus including an AAV protein shell, encapsidating a rAAV vector comprising a transgene of interest, which is flanked on each side by a 5′ AAV ITR and 3′ AAV ITR. A rAAV particle is produced in a suitable host cell which has had sequences specifying a rAAV vector, AAV helper functions and accessory functions introduced therein to render the host cell capable of encoding AAV polypeptides that are required for packaging the rAAV vector (containing the transgene sequence of interest) into infectious rAAV particles for subsequent gene delivery.

[0253] Methods of packaging recombinant AAV vector into AAV capsid proteins using host cell culture are known in the art. In some embodiments, one or more of the required components for packaging the rAAV vector, (e.g., Rep sequence, cap sequence, and/or accessory functions) may be provided by a stable host cell that has been engineered to to contain the one or more required components (e.g., by a vector). Expression of the required components for AAV packaging may be under control of an inducible or constitutive promoter in the host packaging cell. AAV helper vectors are commonly used to provide transient expression of AAV rep and/or cap genes, which function in trans, to complement missing AAV functions that are necessary for AAV replication. In some embodiments, AAV helper vectors lack AAV ITRs and can neither replicate nor package themselves. AAV helper vectors can be in the form of a plasmid, phage, transposon, cosmid, virus, or virion.

[0254] In some embodiments, rAAV particles may be produced using the triple transfection method (see, e.g., U.S. Pat. No. 6,001,650, incorporated herein by reference in its entirety). In this approach, the rAAV particles are produced by transfecting a host cell with a rAAV vector (comprising a transgene) to be packaged into rAAV particles, an AAV helper vector, and an accessory function vector. In some embodiments, the AAV helper function vector supports efficient AAV vector production without generating any detectable wild-type AAV virions (e.g., AAV virions containing functional rep and cap genes). The accessory function vector encodes nucleotide sequences for non-AAV derived viral and/or cellular functions upon which AAV is dependent for replication (e.g., “accessory functions”). The accessory functions include those functions required for AAV replication, including, without limitation, those moieties involved in activation of AAV gene transcription, stage specific AAV mRNA splicing, AAV DNA replication, synthesis of cap expression products, and AAV capsid assembly. Viral-based accessory functions can be derived from any of the known helper viruses such as adenovirus, herpesvirus (other than herpes simplex virus type-1), and vaccinia virus. In some embodiments, a double transfection method, wherein the AAV helper function and accessory function are cloned on a single vector, which is used to generate rAAV particles.

[0255] The AAV capsid is an important element in determining these tissue-specificity of the rAAV particle. Thus, a rAAV particle having a capsid tissue specificity can be selected. In some embodiments, the rAAV particle comprises a capsid protein selected from a AAV serotype of AAV1, AAV2, AAV3, AAV4, AAV5, AAV6, AAV7, AAV8, AAV9, AAV9.47, AAV9(hu14), AAV10, AAV11, AAV 12, AAVrh8, AAVrh10, AAV-DJ8, AAV-DJ, AAV-PUPA, AAV-PHP.B, AAVPHP.B2, AAVPHP.B3, AAVPHP.N/PHP.B-DGT, AAVPHP.B-EST, AAVPHP.B-GGT, AAVPHP.B-ATP, AAVPHP.B-ATT-T, AAVPHP.B-DGT-T, AAVPHP.B-GGT-T, AAVPHP.B-SGS, AAVPHP.B-AQP, AAVPHP.B-QQP, AAVPHP.B-SNP(3), AAVPHP.B-SNP, AAVPHP.B-QGT, AAVPHP.B-NQT, AAVPHP.B-EGS, AAVPHP.B-SGN, AAVPHP.B-EGT, AAVPHP.B-DST, AAVPHP.B-DST, AAVPHP.B-STP, AAVPHP.B-PQP, AAVPHP.B-SQP, AAVPHP.B-QLP, AAVPHP.B-TMP, AAVPHP.B-TTP, AAVPHP.S/G2A12, AAVG2A 15/G2A3, AAVG2B4, AAVG2B5, and variants thereof. In some embodiments, the AAV capsid is selected from a serotype that is capable of crossing the blood-brain barrier, e.g., AAV9, AAVrh.10, AAV-PHP-B, or a variant thereof. In some embodiments, the AAV capsid is a chimeric AAV capsid. In some embodiments, the AAV particle is a pseudotyped AAV, having capsid and genome from different AAV serotypes.

[0256] In some embodiments, the rAAV particle is capable of transducing cells of the CNS. In some embodiments, the rAAV particle is capable of transducing non-neuronal cells or neuronal cells of the CNS. In some embodiments, the CNS cell is a neuron, glial cell, astrocyte, or microglial cell.

[0257] In another aspect, the present disclosure provides host cells transfected with the rAAV comprising the inhibitory nucleic acids or vectors described herein. In some embodiments, the host cell is a prokaryotic cell or a eukaryotic cell. In some embodiments, the host cell is a mammalian cell (e.g., HEK293T, COS cells, HeLa cells, KB cells), bacterial cell (E. coli), yeast cell, insect cell (Sf9, Sf21, Drosophila, mosquito), etc.

### Pharmaceutical Compositions

[0258] In some aspects, the disclosure provides pharmaceutical compositions comprising an inhibitory nucleic acid, isolated nucleic acid comprising an expression construct, or vector as described herein and a pharmaceutically acceptable carrier. As used herein, the term “pharmaceutically acceptable” refers to those compounds, materials, compositions, and/or dosage forms which are, within the scope of sound medical judgment, suitable for use in contact with cells and/or tissues without excessive toxicity, irritation, allergic response, or other problem or complication, commensurate with a reasonable benefit/risk ratio.

[0259] As used herein, the term “pharmaceutically acceptable carrier” means a pharmaceutically acceptable material, composition or carrier, such as a liquid or solid filler, stabilizer, dispersing agent, suspending agent, diluent, excipient, thickening agent, solvent or encapsulating material, involved in carrying or transporting a compound useful within the invention within or to the patient such that it may perform its intended function. Each carrier must be “acceptable” in the sense of being compatible with the other ingredients of the formulation and not injurious to the cell or tissue being contacted. Additional ingredients that may be included in the pharmaceutical compositions used in the practice of the invention are known in the art and described, for example in Remington's Pharmaceutical Sciences (Genaro, Ed., Mack Publishing Co., 1985, Easton, Pa.), which is incorporated herein by reference.

[0260] As is well known in the medical arts, the dosage for any one patient depends upon many factors, including the patient's size, weight, body surface area, age, the level of expression of inhibitory RNA expression required to achieve a therapeutic effect, stability of the inhibitory nucleic acid, specific disease being treated, stage of disease, sex, time and route of administration, general health, and other drugs being administered concurrently. In some embodiments, a rAAV particle as described herein is administered to a subject in an amount of about 1×10⁶ VG (viral genomes) to about 1×10¹⁶ VG per subject, or about 1×10⁶, 2×10⁶, 3×10⁶, 4×10⁶, 5×10⁶, 6×10⁶, 7×10⁶, 8×10⁶, 9×10⁶, 1×10⁷, 2×10⁷, 3×10⁷, 4×10⁷, 5×10⁷, 6×10⁷, 7×10⁷, 8×10⁷, 9×10⁷, 1×10⁸, 2×10⁸, 3×10⁸, 4×10⁸, 5×10⁸, 6×10⁸, 7×10⁸, 8×10⁸, 9×10⁸, 1×10⁹, 2×10⁹, 3×10⁹, 4×10⁹, 5×10⁹, 6×10⁹, 7×10⁹, 8×10⁹, 9×10⁹, 1×10¹⁰, 2×10¹⁰, 3×10¹⁰, 4×10¹⁰, 5×10¹⁰, 6×10¹⁰, 7×10¹⁰, 8×10¹⁰, 9×10¹⁰, 1×10¹¹, 2×10¹¹, 2.1×10¹¹, 2.2×10¹¹, 2.3×10¹¹, 2.4×10¹¹, 2.5×10¹¹, 2.6×10¹¹, 2.7×10¹¹, 2.8×10¹¹, 2.9×10¹¹, 3×10¹¹, 4×10¹¹, 5×10¹¹, 6×10¹¹, 7×10¹¹, 7.1×10¹¹, 7.2×10¹¹, 7.3×10¹¹, 7.4×10¹¹, 7.5×10¹¹, 7.6×10¹¹, 7.7×10¹¹, 7.8×10¹¹, 7.9×10¹¹, 8×10¹¹, 9×10¹¹, 1×10¹², 1.1×10¹², 1.2×10¹², 1.3×10¹², 1.4×10¹², 1.5×10¹², 1.6×10¹², 1.7×10¹², 1.8×10¹², 1.9×10¹², 2×10¹², 3×10¹², 4×10¹², 4.1×10¹², 4.2×10¹², 4.3×10¹², 4.4×10¹², 4.5×10¹², 4.6×10¹², 4.7×10¹², 4.8×10¹², 4.9×10¹², 5×10¹², 6×10¹², 7×10¹², 8×10¹², 8.1×10¹², 8.2×10¹², 8.3×10¹², 8.4×10¹², 8.5×10¹², 8.6×10¹², 8.7×10¹², 8.8×10¹², 8.9×10¹², 9×10¹², 1×10¹³, 2×10¹³, 3×10¹³, 4×10¹³, 5×10¹³, 6×10¹³, 6.7×10¹³, 7×10¹³, 8×10¹³, 9×10¹³, 1×10¹⁴, 2×10¹⁴, 3×10¹⁴, 4×10¹⁴, 5×10¹⁴, 6×10¹⁴, 7×10¹⁴, 8×10¹⁴, 9×10¹⁴, 1×10¹⁵, 2×10¹⁵, 3×10¹⁵, 4×10¹⁵, 5×10¹⁵, 6×10¹⁵, 7×10¹⁵, 8×10¹⁵, 9×10¹⁵, or 1×10¹⁶ VG/subject. In some embodiments, a rAAV particle as described herein is administered to a subject in an amount of about 1×10⁶ VG/kg to about 1×10¹⁶ VG/kg, or about 1×10⁶, 2×10⁶, 3×10⁶, 4×10⁶, 5×10⁶, 6×10⁶, 7×10⁶, 8×10⁶, 9×10⁶, 1×10⁷, 2×10⁷, 3×10⁷, 4×10⁷, 5×10⁷, 6×10⁷, 7×10⁷, 8×10⁷, 9×10⁷, 1×10⁸, 2×10⁸, 3×10⁸, 4×10⁸, 5×10⁸, 6×10⁸, 7×10⁸, 8×10⁸, 9×10⁸, 1×10⁹, 2×10⁹, 3×10⁹, 4×10⁹, 5×10⁹, 6×10⁹, 7×10⁹, 8×10⁹, 9×10⁹, 1×10¹⁰, 2×10¹⁰, 3×10¹⁰, 4×10¹⁰, 5×10¹⁰, 6×10¹⁰, 7×10¹⁰, 8×10¹⁰, 9×10¹⁰, 1×10¹¹, 2×10¹¹, 2.1×10¹¹, 2.2×10¹¹, 2.3×10¹¹, 2.4×10¹¹, 2.5×10¹¹, 2.6×10¹¹, 2.7×10¹¹, 2.8×10¹¹, 2.9×10¹¹, 3×10¹¹, 4×10¹¹, 5×10¹¹, 6×10¹¹, 7×10¹¹, 7.1×10¹¹, 7.2×10¹¹, 7.3×10¹¹, 7.4×10¹¹, 7.5×10¹¹, 7.6×10¹¹, 7.7×10¹¹, 7.8×10¹¹, 7.9×10¹¹, 8×10¹¹, 9×10¹¹, 1×10¹², 1.1×10¹², 1.2×10¹², 1.3×10¹², 1.4×10¹², 1.5×10¹², 1.6×10¹², 1.7×10¹², 1.8×10¹², 1.9×10¹², 2×10¹², 3×10¹², 4×10¹², 4.1×10¹², 4.2×10¹², 4.3×10¹², 4.4×10¹², 4.5×10¹², 4.6×10¹², 4.7×10¹², 4.8×10¹², 4.9×10¹², 5×10¹², 6×10¹², 7×10¹², 8×10¹², 8.1×10¹², 8.2×10¹², 8.3×10¹², 8.4×10¹², 8.5×10¹², 8.6×10¹², 8.7×10¹², 8.8×10¹², 8.9×10¹², 9×10¹², 1×10¹³, 2×10¹³, 3×10¹³, 4×10¹³, 5×10¹³, 6×10¹³, 6.7×10¹³, 7×10¹³, 8×10¹³, 9×10¹³, 1×10¹⁴, 2×10¹⁴, 3×10¹⁴, 4×10¹⁴, 5×10¹⁴, 6×10¹⁴, 7×10¹⁴, 8×10¹⁴, 9×10¹⁴, 1×10¹⁵, 2×10¹⁵, 3×10¹⁵, 4×10¹⁵, 5×10¹⁵, 6×10¹⁵, 7×10¹⁵, 8×10¹⁵, 9×10¹⁵, or 1×10¹⁶VG/kg.

[0261] Pharmaceutical compositions may be administered in a manner appropriate to the disease or condition to be treated (or prevented) as determined by persons skilled in the medical art. An appropriate dose and a suitable duration and frequency of administration of the compositions will be determined by such factors as the health condition of the patient, size of the patient (i.e., weight, mass, or body area), the type and severity of the patient's disease, the particular form of the active ingredient, and the method of administration. In general, an appropriate dose and treatment regimen provide the composition(s) in an amount sufficient to provide therapeutic and/or prophylactic benefit (such as described herein, including an improved clinical outcome, such as more frequent complete or partial remissions, or longer disease-free and/or overall survival, or a lessening of symptom severity). For prophylactic use, a dose should be sufficient to prevent, delay the onset of, or diminish the severity of a disease associated with disease or disorder. Prophylactic benefit of the compositions administered according to the methods described herein can be determined by performing pre-clinical (including in vitro and in vivo animal studies) and clinical studies and analyzing data obtained therefrom by appropriate statistical, biological, and clinical methods and techniques, all of which can readily be practiced by a person skilled in the art.

[0262] Compositions (e.g., pharmaceutical compositions) may be administered by any route, including enteral (e.g., oral), parenteral, intravenous, intramuscular, intra-arterial, intramedullary, intrathecal, subpial, intraparenchymal, intrastriatal, intracranial, intracisternal, intra-cerebral, intracerebral ventricular, intraocular, intraventricular, intralumbar, subcutaneous, transdermal, interdermal, rectal, intravaginal, intraperitoneal, topical (as by powders, ointments, creams, and/or drops), mucosal, nasal, bucal, sublingual; by intratracheal instillation, bronchial instillation, and/or inhalation; and/or as an oral spray, nasal spray, and/or aerosol. In general, the most appropriate route of administration will depend upon a variety of factors including the nature of the agent (e.g., its stability in the environment of the gastrointestinal tract), and/or the condition of the subject. In some embodiments, compositions are directly injected into the CNS of the subject. In some embodiments, direct injection into the CNS is intracerebral injection, intraparenchymal injection, intrathecal injection, intrastriatal injection, subpial injection, or any combination thereof. In some embodiments, direct injection into the CNS is direct injection into the cerebrospinal fluid (CSF) of the subject, optionally wherein the direct injection is is intracisternal injection, intraventricular injection, and/or intralumbar injection.

[0263] In some embodiments, pharmaceutical compositions comprising rAAV particles are formulated to reduce aggregation of rAAV particles, particularly where high rAAV particle concentrations are present (e.g., ^{˜}10¹³ VG/ml or more). Methods for reducing aggregation of rAAV particles are well known in the art and, include, for example, addition of surfactants, pH adjustment, salt concentration adjustment, etc. (See, e.g., Wright F R, et al., Molecular Therapy (2005) 12:171-178, incorporated herein by reference in its entirety).

### Kits

[0264] In some embodiments, the compositions provided herein may be assembled into pharmaceutical or research kits to facilitate their use in therapeutic or research use. A kit may include one or more containers comprising: (a) inhibitory nucleic acid, isolated nucleic acid comprising an expression construct, or vector as described herein; (b) instructions for use; and optionally (c) reagents for transducing the kit component (a) into a host cell. In some embodiments, the kit component (a) may be in a pharmaceutical formulation and dosage suitable for a particular use and mode of administration. For example, the kit component (a) may be presented in unit-dose or multi-dose containers, such as sealed ampoules or vials. The components of the kit may require mixing one or more components prior to use or may be prepared in a premixed state. The components of the kit may be in liquid or solid form, and may require addition of a solvent or further dilution. The components of the kit may be sterile. The instructions may be in written or electronic form and may be associated with the kit (e.g., written insert, CD, DVD) or provided via internet or web-based communication. The kit may be shipped and stored at a refrigerated or frozen temperature.

### Methods of Treatment

[0265] In another aspect, the present disclosure provides methods for inhibiting the expression or activity of ATXN2 in a cell, comprising administering a composition of the present disclosure (e.g., inhibitory nucleic acid, isolated nucleic acid comprising an expression construct encoding an inhibitory nucleic acid, vector, rAAV particle, pharmaceutical composition) to a cell, thereby inhibiting the expression or activity of ATXN2 in the cell. In some embodiments, the cell is a CNS cell. In some embodiments, the cell is a non-neuronal cell or neuronal cell of the CNS. In some embodiments, the non-neuronal cell of the CNS is a glial cell, astrocyte, or microglial cell. In some embodiments, the cell is in vitro. In some embodiments, the cell is from a subject having one or more symptoms of a neurodegenerative disease or suspected of having a neurodegenerative disease. In some embodiments, the cell expresses an ATXN2 having at least 22, 23, 24, 25, 26, 27, 28, 29, 30, 31, 32, 33, 34 or more CAG trinucleotide (polyglutamine) repeats. In some embodiments, the cell expresses an ATXN2 having about 22 or 23 repeats, 24-32 repeats, or 33-100 or more repeats.

[0266] In another aspect, the present disclosure provides methods for inhibiting the expression or activity of ATXN2 in the central nervous system of a subject, comprising administering a composition of the present disclosure (e.g., inhibitory nucleic acid, isolated nucleic acid comprising an expression construct encoding an inhibitory nucleic acid, vector, rAAV particle, pharmaceutical composition) to the subject, thereby inhibiting the expression or activity of ATXN2 in the subject.

[0267] In another aspect, the present disclosure provides methods for treating a subject having or suspected of having a neurodegenerative disease, comprising administering a composition of the present disclosure (e.g., inhibitory nucleic acid, isolated nucleic acid comprising an expression construct encoding an inhibitory nucleic acid, vector, rAAV particle, pharmaceutical composition) to the subject, thereby treating the subject. As used herein, the term “treat” refers to preventing or delaying onset of neurodegenerative disease (e.g., ALS/FTD, Alzheimer's disease, Parkinson's disease, etc.); reducing severity of neurodegenerative disease; reducing or preventing development of symptoms characteristic of neurodegenerative disease; preventing worsening of symptoms characteristic of neurodegenerative disease, or any combination thereof.

[0268] Neurodegenerative diseases that may be treated in a subject using the compositions of the present disclosure include neurodegenerative diseases where ATXN2 is a causative agent (e.g., SCA2), as well as neurodegenerative diseases where ATXN2 is not the causative agent but modifies TDP-43 pathological aggregation. Neurodegenerative diseases associated with TDP-43 proteinopathy include ALS, FTD, primary lateral sclerosis, progressive muscular atrophy, limbic-predominant age-related TDP-43 encephalopathy, chronic traumatic encephalopathy, dementia with Lewy bodies, corticobasal degeneration, progressive supranuclear palsy (PSP), dementia Parkinsonism ALS complex of guam (G-PDC), Pick's disease, hippocampal sclerosis, Huntington's disease, Parkinson's disease, and Alzheimer's disease.

[0269] In some embodiments, the subject is characterized as having an ATXN2 allele having at least 22, 23, 24, 25, 26, 27, 28, 29, 30, 31, 32, 33, 34 or more CAG trinucleotide (polyglutamine) repeats. In some embodiments, the subject is characterized as having an ATXN2 allele having about 22 or 23 repeats, 24-32 repeats, or 33-100 or more repeats.

[0270] In some embodiments, the methods for treatment of the present disclosure reduces, prevents, or slows development or progression of one or more symptom characteristic of a neurodegenerative disease. Examples of symptoms characteristic of neurodegenerative disease include motor dysfunction, cognitive dysfunction, emotional/behavioral dysfunction, or any combination thereof. Paralysis, shaking, unsteadiness, rigidity, twitching, muscle weakness, muscle cramping, muscle stiffness, muscle atrophy, difficulty swallowing, difficulty breathing, speech and language difficulties (e.g., slurred speech), slowness of movement, difficulty with walking, dementia, depression, anxiety, or any combination thereof.

[0271] In some embodiments, the methods for treatment of the present disclosure of the present disclosure comprise administration as a monotherapy or in combination with one or more additional therapies for the treatment of the neurodegenerative disease. Combination therapy may mean administration of the compositions of the present disclosure (e.g., inhibitory nucleic acid, isolated nucleic acid comprising an expression construct encoding an inhibitory nucleic acid, vector, rAAV particle, pharmaceutical composition) to the subject concurrently, prior to, subsequent to one or more additional therapies. Concurrent administration of combination therapy may mean that the the compositions of the present disclosure (e.g., inhibitory nucleic acid, isolated nucleic acid comprising an expression construct encoding an inhibitory nucleic acid, vector, rAAV particle, pharmaceutical composition) and additional therapy are formulated for administration in the same dosage form or administered in separate dosage forms.

[0272] In some embodiments, the one or additional therapies that may be used in combination with the inhibitory nucleic acids of the present disclosure include: inhibitory nucleic acids or antisense oligonucleotides that target neurodegenerative disease related genes or transcripts (e.g., C9ORF72), gene editing agents (e.g., CRISPR, TALEN, ZFN based systems) that target neurodegenerative related genes (e.g., C9ORF72), agents that reduce oxidative stress, such as free radical scavengers (e.g., Radicava (edaravone), bromocriptine); antiglutamate agents (e.g., Riluzole, Topiramate, Lamotrigine, Dextromethorphan, Gabapentin and AMPA receptor antagonist (e.g., Talampanel)); Anti-apoptosis agents (e.g., Minocycline, Sodium phenylbutyrate and Arimoclomol); Anti-inflammatory agents (e.g., ganglioside, Celecoxib, Cyclosporine, Nimesulide, Azathioprine, Cyclophosphamide, Plasmapheresis, Glatiramer acetate and thalidomide); Beta-lactam antibiotics (penicillin and its derivatives, ceftriaxone, and cephalosporin); Dopamine agonists (Pramipexole, Dexpramipexole); and neurotrophic factors (e.g., IGF-1, GDNF, BDNF, CTNF, VEGF, Colivelin, Xaliproden, Thyrotrophin-releasing hormone and ADNF).

[0273] In some embodiments, an inhibitory nucleic acid of the present disclosure is administered in combination with an additional therapy targeting C9ORF72. In some embodiments, the additional therapy targeting C9ORF72 comprises an inhibitory nucleic acid targeting C9ORF72 transcript, a C9ORF72 specific antisense oligonucleotide, or a C9ORF72 specific gene editing agent. Examples of C9ORF72 specific therapies are described in U.S. Pat. No. 9,963,699 (antisense oligonucleotides); PCT Publication No. WO2019/032612 (antisense oligonucleotides); U.S. Pat. No. 10,221,414 (antisense oligonucleotides); U.S. Pat. No. 10,407,678 (antisense oligonucleotides); U.S. Pat. No. 9,963,699 (antisense oligonucleotides); US Patent Publication US2019/0316126 (inhibitory nucleic acids); US Patent Publication No. 2019/0167815 (gene editing); PCT Publication No. WO2017/109757 (gene editing), each of which is incorporated by reference in its entirety.

[0274] In some embodiments, a subject treated in any of the methods described herein is a mammal (e.g., mouse, rat), preferably a primate (e.g., monkey, chimpanzee), or human.

[0275] In any of the methods of treatment described herein, a composition of the present disclosure (e.g., inhibitory nucleic acid, isolated nucleic acid comprising an expression construct encoding an inhibitory nucleic acid, vector, rAAV particle, pharmaceutical composition) may be administered to the subject by intrathecal, subpial, intraparenchymal, intrastriatal, intracranial, intracisternal, intra-cerebral, intracerebral ventricular, intraocular, intraventricular, intralumbar administration, or any combination thereof.

[0276] In some embodiments, a composition of the present disclosure (e.g., inhibitory nucleic acid, isolated nucleic acid comprising an expression construct encoding an inhibitory nucleic acid, vector, rAAV particle, pharmaceutical composition) is directly injected into the CNS of the subject. In some embodiments, direct injection into the CNS is intracerebral injection, intraparenchymal injection, intrathecal injection, intrastriatal injection, subpial injection, or any combination thereof. In some embodiments, direct injection into the CNS is direct injection into the cerebrospinal fluid (CSF) of the subject, optionally wherein the direct injection is intracisternal injection, intraventricular injection, intralumbar injection, or any combination thereof.

[0277] In some embodiments, the methods of the present disclosure reduces ATXN2 expression or activity in a cell by at least 10%, at least 15%, at least 20%, at least 25%, at least 30%, at least 35%, at least 40%, at least 45%, at least 50%, at least 60%, at least 70%, at least 80%, at least 90% at least 95% or more in a cell compared to the expression level of ATXN2 in a cell that has not been contacted with the inhibitory nucleic acid. In some embodiments, the methods of the present disclosure reduces ATXN2 expression or activity in a cell by 10-20%, 10-30%, 10-40%, 10-50%, 10-60%, 10-70%, 10-80%, 10-90%, 10-95%, 20-30%, 20-40%, 20-50%, 20-60%, 20-70%, 20-80%, 20-90%, 20-95%, 20-100%, 30-40%, 30-50%, 30-60%, 30-70%, 30-80%, 30-90%, 30-95%, 30-100%, 40-50%, 40-60%, 40-70%, 40-80%, 40-90%, 40-95%, 40-100%, 50-60%, 50-70%, 50-80%, 50-90%, 50-95%, 50-100%, 60-70%, 60-80%, 60-90%, 60-95%, 60-100%, 70-80%, 70-90%, 70-95%, 70-100%, 80-90%, 80-95%, 80-100%, 90-95%, 90-100% compared to the expression level of ATXN2 in a cell that has not been contacted with the inhibitory nucleic acid.

[0278] In some embodiments, the methods of the present disclosure reduces ATXN2 expression or activity in the CNS of a subject by at least 10%, at least 15%, at least 20%, at least 25%, at least 30%, at least 35%, at least 40%, at least 45%, at least 50%, at least 60%, at least 70%, at least 80%, at least 90% at least 95% or more in the CNS compared to the expression level of ATXN2 in the CNS of an untreated subject. In some embodiments, the methods of the present disclosure reduces ATXN2 expression or activity in the CNS of a subject by 10-20%, 10-30%, 10-40%, 10-50%, 10-60%, 10-70%, 10-80%, 10-90%, 10-95%, 20-30%, 20-40%, 20-50%, 20-60%, 20-70%, 20-80%, 20-90%, 20-95%, 20-100%, 30-40%, 30-50%, 30-60%, 30-70%, 30-80%, 30-90%, 30-95%, 30-100%, 40-50%, 40-60%, 40-70%, 40-80%, 40-90%, 40-95%, 40-100%, 50-60%, 50-70%, 50-80%, 50-90%, 50-95%, 50-100%, 60-70%, 60-80%, 60-90%, 60-95%, 60-100%, 70-80%, 70-90%, 70-95%, 70-100%, 80-90%, 80-95%, 80-100%, 90-95%, 90-100% compared to the expression level of ATXN2 in the CNS of an untreated subject.

### EXAMPLES

### Example 1: Design and Testing of siRNA Sequences to Knock Down Human ATAXIN-2

[0279] A number of criteria were used to select and design siRNA sequences to knock down ATXN2. The potential siRNA sequences that were initially considered included all possible 22-nucleotide RNAs complementary to ENST00000377617.7 (ATXN2-201). Human transcripts encoding for human Ataxin-2 were first examined. Only sequences found in all five of ATXN2 transcripts, NM_002973.3 (SEQ ID NO:2), ENST00000377617.7, ENST00000550104.5( ), ENST00000608853.5( ), and ENST00000616825.4( ), were selected.

[0280] The set of sequences was then filtered by cross-reactivity to the orthologous ATXN2 gene in rhesus and cynomolgous monkey. This allows the sequences to be tested in these species if needed to establish the activity and safety of gene therapies containing these inhibitory nucleic acid sequences prior to therapeutic use in humans. Thus, the sequence was also required to be in rhesus (Macaca mulatta) ATXN2 (NCBI Reference Sequences: XM_015152804.1, XM_015152805.1, XM_015152806.1, XM_015152807.1, XM_015152809.1, XM_015152810.1, XM_015152811.1, XM_015152812.1, XM_015152814.1, (Ensemble ID:) ENSMMUT00000062319, and ENSMMUT00000074794) and cynomolgous monkeys (Macaca fascicularis) ATXN2 (NCBI Reference Sequences: XM_005572266.2, XM_005572267.2, XM_015431532.1, XM_015431533.1, XM_015431534.1, XM_015431535.1, XM_015431536.1, XM_015431537.1, XM_015431538.1, XM_015431539.1, XM_015431540.1, XM_015431541.1, XM_015431542.1, XM_015431543.1, XM_015431544.1, XM_015431546.1, XM_015431547.1, XM_015431548.1, XM_015431549.1, XM_015431550.1, ENSMFAT00000019903.1). The ATXN2 transcript XM_015152813.1 of rhesus was also examined. This transcript was observed to be lacking a component of exon 1 and exon 2 (by comparison to human ATXN2 sequence SEQ ID NO:2). As described above for rhesus sequences, the following Macaca ATXN2 transcripts were identified to lack upstream sequence in exon 1: XM_015431551.1 and ENSMFAT00000019905.1. For these sequences, the exon 1 sequence was added back from human (SEQ ID NO:2) so as not to filter out that sequence. The nucleotide sequence in the ATXN2 gene encoding for the poly-glutamine repeat contains elements likely found elsewhere in the genome in other poly-glutamine repeat sequences. It is possible that automated transcript assignment algorithms, relying on alignment of RNAseq data, would mis-align sequencing reads overlapping with the poly-glutamine-encoding stretch (CAG repeating sequence) elsewhere in the genome, undercounting this sequence. These sequences in the upstream part of ATXN2 were therefore not excluded, except due to non-conservation from human to primate sequences.

[0281] Based on an analysis of brain RNAseq, exon 12 skipping is about 3% frequency, so this was not filtered out despite some alternative splice isoforms not including this isoform.

[0282] After defining the sequences expected to be present in human ATXN2 and key toxicology species, siRNAs were further selected based on criteria to reduce likelihood of off-target effects and to improve likelihood of strong ATXN2 knockdown. The seed sequences of both the antisense and sense strands of siRNAs, that is, bases 2-7 of the sequences which are known to be key determinants of activity of endogenous microRNAs, were examined for conservation in endogenous miRNAs expressed in human, mouse and rat. Antisense sequences present in any human endogenous miRNA were excluded, as were all sequences that were conserved in both mouse and rat. Sense sequences were excluded if seed regions were conserved in endogenous miRNAs present in more than 2 species out of human, mouse and rat.

[0283] A predicted knockdown ranking was calculated by adapting a version of an algorithm published in Pelossof et al. (Nature Biotechnology (2017) 35:350-353). Essentially, a support vector machine was trained on tiled sequencing data, provided in the publication. To generate the points in the space in which the support vector machine attempts to separate training examples which are labeled positive and negative, for good and bad knockdown respectively, features were selected as a weighted degree kernel. Features input to the support vector machine classifier were essentially the same as in Pelossof et al. For the SVM model, the “LibSVM” function from the Shogun module (version 6.1.3, Python version 2.7) was used instead of “SVMlite.”

[0284] The training set included 18,421 shRNA sequences from the genes PCNA, Trp53, Hras, Rpa3, Mcl1, hMyc, Myc, Bcl2, and Kras, all from the ‘TILE’ data set included in Pelossof et al. The TILE dataset empirically tests the performance of unbiased libraries of shRNAs covering sequences in the 9 genes described. The cost function c was assessed across a range of values training the SVM classifier on all genes except one of the nine left out, and calculating mean squared error on predictions for performance on data from the held-out gene. An example with Kras as the held out gene is shown (FIG. 1). A value of c=4 was selected which minimized the mean square error among values of c tested.

[0285] To further assess the performance of the classifier, knockdown data from another gene in the data set (Trp53) was held out after training the classifier on the other 8 genes. FIG. 2 shows a precision-recall curve for the classifier, as trained on data not including the Trp53 shRNAs, predicting performance of shRNA knockdown in the Trp53 targeting shRNAs. That is, after filtering shRNAs by a given classifier score, the fraction of of true positives identified by the classifier (recall) is plotted as a function of the number of true positives versus false positives (precision) (FIG. 2). Additionally, the anticipated cumulative fraction of ‘positive’ shRNAs (high performing) shRNAs that are expected to be lost as the classifier score was increased in stringency was plotted (FIG. 3), alongside the percent improvement in rejection of low-performing shRNAs. A separation in the curves was noted between scores of approximately −1.5 to −0.8, going from roughly the 25^{th} to 50^{th} percentiles of scores for Trp53 targeting shRNAs.

[0286] Next, siRNA sequences were triaged by specificity considerations, then ranked by the score from the above classifier. In addition to conservation of the seed sequences with endogenous miRNAs, as described above, metrics of specificity were: (a) comparison of seed sequences (guide bases 2-7) to a published data set of transfected siRNA seed sequences versus cell proliferation (Gaoao et al. Nature Communications (2018) 9:4504), excluding sequences with a >70% reduction of cell proliferation in the published assay; (b) the number of transcripts complementary to the first 19 nucleotides of the guide sequence, with 2 or fewer mismatches, was required to be less than 15; and (c) other considerations such as an internal algorithm of specificity were also factored in but triaged fewer samples than the criteria of (a) and (b).

[0287] Following filtering by specificity, sequences in the most common ATXN2 transcript, were ranked by SVM score and top-ranked candidate sequences selected. In calculating the SVM classifier score for shRNAs, however, it was found that the classifier score significantly increased for shRNAs beginning with U (FIG. 4). This was consistent with prior prediction algorithms (e.g., Vert et al., BMC Bioinformatics (2006) BMC Bioinformatics 7:520) and literature suggesting that the argonaute 2 binding pocket interacts best with this base, although guide base 1 does not base pair with the target mRNA (Boland et al., EMBO Reports (2010) 11:522-527). Therefore, for shRNA design, if the base was a ‘G’ or ‘C,’ based on complementarity to the target mRNA sequence, that base was replaced with a ‘U’ and the corresponding performance score calculated. The top 93 sequences beginning with A or U (SVM score >−0.8) and 34 sequences edited from a shRNA beginning with G or C, with a more stringent filter (SVM score >0.4).

[0288] Additional sequences were included for testing based on other criteria, including: (a) cross-reactivity with ATXN2L. ATXN2L shares considerable amino acid sequence similarity with ATXN2. Homologous genes often execute similar functions in a cell, and it is possible that knockdown of ATXN2L may serve similar therapeutic functions as knocking down ATXN2. Sequences which match both ATXN2 and ATXN2L may therefore have additional therapeutic benefit, and thus, 10 sequences were selected with potential to target both ATXN2 and ATXN2L; (b) sequences meeting a stringent off-target match criteria, with 2 or fewer transcripts matching at 2 or fewer positions in the first 19 nucleotides of the siRNA guide sequence (10 siRNAs), but ignoring SVM-based efficacy prediction; (c) sequences with perfect match or single mismatch to mouse ATXN2 in the first 19 nucleotides of the guide sequence. ‘Single mismatch’ guide sequences were defined as those where only one mismatch occurs between bases 12 and 19 nts against the mouse sequence, and none in bases 1-11. For guide sequences perfect-matching or single-mismatching mouse, the specificity criteria were relaxed, with guide sequences accepted with fewer than 50 complementary transcripts with 2 or fewer mismatches.

Selection of Cell Line to Screen siRNA Candidates

[0289] Following selection of siRNAs for testing, an in vitro cell system was established to assess knockdown of ATXN2 by siRNAs. ATXN2 levels were assessed by quantigene assay (Thermo Fisher), across a panel of cell lines (FIG. 5). The cell lines HepG2, KB, HT-29, LNCAP, C4-2 and Panc-1 all showed robust ATXN2 expression. To see if the splice patterns of cells were similar to that of ATXN2 in relevant target tissues, including in neurodegenerative disease states, RNAseq of postmortem human brain (Mayo Clinic Alzheimer's Disease Genetics Studies**; accessed via the synapse.org platform) was examined for splice patterns of ATXN2 and compared to data from cell lines (National Cancer Institute GDC Legacy Archive). In FIG. 6A, alternatively spliced exons were identified by reads crossing genomic regions that skip over the alternatively spliced exons. Exons 10, 21, and 24 in brain are frequently alternatively spliced. Examining alternative splicing in cell lines, HepG2 were similar to human brain (FIG. 6B). This line was selected for ATXN2 siRNA studies because of the high level of ATXN2 expression relative to background and consistent alternative splice patterns.

[0290] With regard to the synapse.org platform, study data were provided by the following sources: The Mayo Clinic Alzheimer's Disease Genetic Studies, led by Dr. Nilüfer Ertekin-Taner and Dr. Steven G. Younkin, Mayo Clinic, Jacksonville, Fla. using samples from the Mayo Clinic Study of Aging, the Mayo Clinic Alzheimer's Disease Research Center, and the Mayo Clinic Brain Bank. Data collection was supported through funding by NIA grants P50 AG016574, R01 AG032990, U01 AG046139, R01 AG018023, U01 AG006576, U01 AG006786, R01 AG025711, R01 AG017216, R01 AG003949, NINDS grant R01 NS080820, CurePSP Foundation, and support from Mayo Foundation. The following publications are applicable:
[0291] [1] Carrasquillo et. al., Nat Genet. (2009) 41:192-8.
[0292] [2] Zou et. al. PLoS Genet. (2012) 8(6):e1002707. [3] Allen et al. Sci Data. (2016) 3:160089.
   Synthesis and Testing of siRNAs

[0293] siRNAs were synthesized as 22 nucleotide RNAs, with 20 bp of complementarity (complementarity from positions 1-20, of guide and passenger strands). Here, guide strand refers to the sequence complementary to, or antisense to, the ATXN2 target mRNA, and passenger strand refers to the strand complementary to guide strand. Guide and passenger strands, also referred to as antisense and sense strand RNAs, are shown in Table 1. Sequences were synthesized as guide and passenger strands. All but 6 of the sequences met the following criteria: single strands within 0.05% of calculated mass (by LC/MS). At least 85% of full-length oligonucleotide purity (by HPLC). After annealing guide and passenger strands, duplex purity of >90% by non-denaturing HPLC. Oligonucleotides not meeting these criteria are noted as “FAIL,” but data are included for completeness.

[0294] Annealed siRNAs were reverse transfected, adding 20,000 cells per well of a 96-well plate, on top of a solution of lipofectamine 2000 with siRNA to yield a final siRNA concentration in the diluted culture media as noted below, in a volume of 0.5 microliters of transfection solution per well. siRNAs were tested in quadruplicate wells and incubated for 24 hours. ATXN2 and GAPDH levels were assayed in cell lysates by Quantigene assay using ATXN2 and GAPDH probes (Thermo Fisher). The ratio of ATXN2 mRNA levels to levels of the housekeeping gene GAPDH was calculated, and values were normalized to ATXN2/GAPDH ratios obtained for cells mock-treated with lipofectamine not containing siRNA.

[0295] All siRNAs were tested at doses of 20 nM or 1 nM (final calculated concentration of siRNA in cell culture media) for level of ATXN2 following knockdown (Table 4). A significant correlation, as assessed by a linear model fit, was observed plotting the predicted SVM score classifier against the 20 nM siRNA knockdown data (FIG. 8) (p<10⁻⁸, R²=0.15). Subsequently, the top ranked 100 siRNAs, by ATXN2 knockdown from 1 nM siRNA dosing data, were rescreened at 200 pM (Table 5). FIG. 7 plots the knockdown of ATXN2 mRNA for siRNAs as a function for position along the ATXN2 transcript that they transcript.

TABLE 4
siRNA Single Point Testing Data 20 nM-knockdown of ATXN2 mRNA

| siRNA Duplex ID | 20 nM_mean | 20 nM_SD | 1 nM_mean | 1 nM_SD |
|---|---|---|---|---|
| XD-14738 | 84.1 | 6.8 | 91.1 | 3.6 |
| XD-14739 | 88.6 | 4.7 | 96.8 | 6.9 |
| XD-14740 | 87.1 | 3.4 | 82.9 | 3.4 |
| XD-14741 | 56.4 | 2.3 | 54.6 | 3.2 |
| XD-14742 | 44.5 | 2.5 | 44.7 | 3.5 |
| XD-14743 | 44.9 | 2 | 48.1 | 3.5 |
| XD-14744 | 62 | 2.9 | 65.7 | 2.1 |
| XD-14745 | 42.5 | 3.9 | 47.3 | 3.5 |
| XD-14746 | 65.4 | 3.9 | 62.5 | 2 |
| XD-14747 | 43.2 | 2.4 | 41.2 | 1.8 |
| XD-14748 | 52.4 | 1.6 | 49.3 | 1.9 |
| XD-14749 | 60.2 | 3 | 57.4 | 1.3 |
| XD-14750 | 52.3 | 3.3 | 53.5 | 1.2 |
| XD-14751 | 47.7 | 4 | 54.6 | 1.1 |
| XD-14752 | 78.4 | 3.3 | 76.4 | 6.4 |
| XD-14753 | 47.7 | 2.4 | 55 | 1.1 |
| XD-14754 | 47.5 | 8.4 | 50.6 | 2.8 |
| XD-14755 | 79 | 3.6 | 73.3 | 3.9 |
| XD-14756 | 37.6 | 5.2 | 46.8 | 7.8 |
| XD-14757 | 32.5 | 1 | 39.7 | 0.4 |
| XD-14758 | 29.6 | 0.9 | 35.3 | 5.2 |
| XD-14759 | 43.6 | 4.3 | 51.8 | 5.5 |
| XD-14760 | 45 | 1.3 | 52.3 | 3.6 |
| XD-14761 | 40.2 | 1.8 | 54.7 | 4.1 |
| XD-14762 | 39.4 | 2.5 | 47.8 | 2.3 |
| XD-14763 | 39.2 | 3 | 50.6 | 1.7 |
| XD-14764 | 80.9 | 4.4 | 81.2 | 8.7 |
| XD-14765 | 43.1 | 2.9 | 49.5 | 5.1 |
| XD-14766 | 30.3 | 0.7 | 33.1 | 3.6 |
| XD-14767 | 43.6 | 5.6 | 38.5 | 2.5 |
| XD-14768 | 35.9 | 3.3 | 40.9 | 2 |
| XD-14769 | 72 | 7.6 | 78.7 | 2 |
| XD-14770 | 50.7 | 7.6 | 56.9 | 3.1 |
| XD-14771 | 59.8 | 6.5 | 77.4 | 17.7 |
| XD-14772 | 81.1 | 2.1 | 80.2 | 1.1 |
| XD-14773 | 44.2 | 3.1 | 52.1 | 5.2 |
| XD-14774 | 81 | 7.1 | 74.8 | 12.1 |
| XD-14775 | 42.3 | 4.3 | 44.3 | 2.6 |
| XD-14776 | 50.3 | 2.2 | 45.7 | 2.7 |
| XD-14777 | 51 | 5.4 | 53.2 | 1.9 |
| XD-14778 | 71.2 | 5.2 | 69.2 | 6.1 |
| XD-14779 | 36.5 | 2.8 | 34.7 | 4.3 |
| XD-14780 | 121.4 | 8.7 | 97.2 | 6 |
| XD-14781 | 52.7 | 5.9 | 69.7 | 3.3 |
| XD-14782 | 46.3 | 2 | 61.1 | 3.2 |
| XD-14783 | 44.6 | 2.1 | 56.9 | 2.8 |
| XD-14784 | 49.8 | 1.3 | 64.4 | 2.7 |
| XD-14785 | 48.1 | 8.7 | 61.4 | 4.5 |
| XD-14786 | 45.1 | 2.5 | 44.7 | 6.5 |
| XD-14787 | 43.3 | 7.4 | 48.2 | 2.8 |
| XD-14788 | 34.8 | 1.4 | 41.7 | 4.7 |
| XD-14789 | 44.6 | 0.8 | 62.3 | 2.8 |
| XD-14790 | 31.3 | 0.8 | 36.7 | 2.6 |
| XD-14791 | 29.5 | 1.5 | 38.9 | 2.9 |
| XD-14792 | 31.2 | 2.6 | 38 | 0.9 |
| XD-14793 | 38.3 | 1.7 | 47.9 | 2.9 |
| XD-14794 | 34.7 | 1.4 | 38.6 | 1.3 |
| XD-14795 | 36.4 | 5.4 | 47.9 | 4.1 |
| XD-14796 | 91.9 | 7 | 91.1 | 8.3 |
| XD-14797 | 61.9 | 1.2 | 74.9 | 17.3 |
| XD-14798 | 31.2 | 2.3 | 33.9 | 2 |
| XD-14799 | 32.5 | 2.1 | 39.8 | 3.3 |
| XD-14800 | 30.4 | 1.4 | 43.3 | 6 |
| XD-14801 | 32.8 | 3.4 | 36.2 | 0.9 |
| XD-14802 | 56.3 | 1 | 70.5 | 2.4 |
| XD-14803 | 45.2 | 1.3 | 56.8 | 5.2 |
| XD-14804 | 74.3 | 3.6 | 76.2 | 5 |
| XD-14805 | 47.2 | 3.5 | 50.1 | 3.5 |
| XD-14806 | 71.4 | 5.8 | 75 | 4.4 |
| XD-14807 | 42.4 | 2.4 | 52.7 | 3.6 |
| XD-14808 | 42.8 | 2.6 | 53.1 | 5 |
| XD-14809 | 47.4 | 3.3 | 49 | 2.8 |
| XD-14810 | 39.7 | 1.7 | 48 | 1.4 |
| XD-14811 | 38.9 | 4.8 | 46.3 | 0.9 |
| XD-14812 | 40.8 | 4.9 | 47.1 | 2.3 |
| XD-14813 | 57.8 | 5.9 | 59.5 | 2.3 |
| XD-14814 | 103.2 | 29.6 | 81.5 | 2.9 |
| XD-14815 | 54. | 4.4 | 48.6 | 7 |
| XD-14816 | 35.9 | 2.8 | 40.8 | 3.3 |
| XD-14817 | 64 | 11.2 | 66.3 | 1.4 |
| XD-14818 | 49.4 | 2.8 | 49.5 | 1 |
| XD-14819 | 41.9 | 4 | 40.8 | 1.5 |
| XD-14820 | 42.8 | 4.3 | 46 | 1.3 |
| XD-14821 | 47.9 | 3.4 | 63 | 4.3 |
| XD-14822 | 37.3 | 3.1 | 45.5 | 2.9 |
| XD-14823 | 51.7 | 4.6 | 66.4 | 0.4 |
| XD-14824 | 38.6 | 1.3 | 45.5 | 2.3 |
| XD-14825 | 35.9 | 2.7 | 41.3 | 0.9 |
| XD-14826 | 39.2 | 1.5 | 46.1 | 3 |
| XD-14827 | 54.3 5. | 2.7 | 62.3 | 1.4 |
| XD-14828 | 63.8 | 1.9 | 77.1 | 3.5 |
| XD-14829 | 40.1 | 0.6 | 38.2 | 8.1 |
| XD-14830 | 36.7 | 0.7 | 46 | 0.9 |
| XD-14831 | 42.5 | 2.9 | 61.8 | 3.4 |
| XD-14832 | 71.3 | 2 | 95.6 | 1.5 |
| XD-14833 | 56.5 | 2.8 | 75.1 | 2.3 |
| XD-14834 | 38.3 | 1.6 | 47 | 2.6 |
| XD-14835 | 30.6 | 2.4 | 38.5 | 1.6 |
| XD-14836 | 44.5 | 3.2 | 58 | 2.7 |
| XD-14837 | 29.2 | 3.4 | 36.2 | 0.5 |
| XD-14838 | 36.5 | 2 | 46.1 | 1.2 |
| XD-14839 | 32 | 2.9 | 42.5 | 4 |
| XD-14840 | 29.3 | 2.3 | 34.1 | 7.6 |
| XD-14841 | 32.9 | 2.5 | 41.2 | 3.7 |
| XD-14842 | 38.8 | 3.4 | 45.6 | 2.5 |
| XD-14843 | 32.9 | 1.2 | 40 | 1.6 |
| XD-14844 | 88.5 | 4.9 | 84.6 | 4.8 |
| XD-14845 | 72.5 | 9.4 | 67.6 | 1.9 |
| XD-14846 | 29 | 1.7 | 34.6 | 3.4 |
| XD-14847 | 34.1 | 1.2 | 38.6 | 2.5 |
| XD-14848 | 40.4 | 0.5 | 46.3 | 3 |
| XD-14849 | 58.5 | 2.1 | 67 | 1.4 |
| XD-14850 | 34.7 | 0.6 | 38.7 | 0.7 |
| XD-14851 | 46.6 | 3.4 | 47 | 0.9 |
| XD-14852 | 61.4 | 2.4 | 55.9 | 2.6 |
| XD-14853 | 47 | 3.7 | 42 | 2.4 |
| XD-14854 | 43.3 | 5.3 | 40.8 | 4.9 |
| XD-14855 | 45.5 | 1.6 | 43.7 | 2.1 |
| XD-14856 | 43.9 | 3.3 | 40.7 | 5 |
| XD-14857 | 39.5 | 5.3 | 36.1 | 2.3 |
| XD-14858 | 63.8 | 4.7 | 54.1 | 1.1 |
| XD-14859 | 39 | 3.6 | 40.3 | 1 |
| XD-14860 | 35.5 | 3.2 | 36.2 | 1.6 |
| XD-14861 | 35.8 | 2.9 | 42.3 | 2.2 |
| XD-14862 | 85.3 | 2.6 | 84.2 | 7 |
| XD-14863 | 56.3 | 6.3 | 52.6 | 3.4 |
| XD-14864 | 46.3 | 3.1 | 47.2 | 2.3 |
| XD-14865 | 77.5 | 2.6 | 79.6 | 4 |
| XD-14866 | 52.6 | 4.4 | 53.2 | 7.4 |
| XD-14867 | 70.6 | 4.6 | 56.7 | 5.4 |
| XD-14868 | 79.8 | 3.4 | 72.5 | 3.8 |
| XD-14869 | 93.1 | 3 | 89.4 | 3.7 |
| XD-14870 | 60.9 | 0.9 | 65.1 | 4.2 |
| XD-14871 | 86.1 | 1.6 | 94 | 8.6 |
| XD-14872 | 93.1 | 3.6 | 91.8 | 5.5 |
| XD-14873 | 94.4 | 2.3 | 90.2 | 4.6 |
| XD-14874 | 60.7 | 4.3 | 56.9 | 7.5 |
| XD-14875 | 50 | 1.3 | 49.5 | 2.7 |
| XD-14876 | 53.5 | 15.9 | 51.7 | 4.1 |
| XD-14877 | 55 | 4 | 61 | 1.4 |
| XD-14878 | 49.6 | 1.5 | 47.4 | 2.2 |
| XD-14879 | 65 | 2.2 | 64.9 | 2.3 |
| XD-14880 | 47 | 1 | 44.5 | 1.8 |
| XD-14881 | 90.3 | 4.7 | 90.6 | 2 |
| XD-14882 | 39.7 | 1.5 | 40.1 | 5.1 |
| XD-14883 | 58 | 1.4 | 65.9 | 5 |
| XD-14884 | 62.7 | 2.2 | 67.9 | 6.1 |
| XD-14885 | 46.6 | 3.3 | 53.8 | 6.6 |
| XD-14886 | 39.5 | 1.4 | 44.4 | 7.5 |
| XD-14887 | 38.2 | 0.4 | 41.7 | 5.1 |
| XD-14888 | 61.4 | 2.1 | 68.9 | 4.9 |
| XD-14889 | 31.2 | 8.8 | 40.7 | 2.7 |
| XD-14890 | 36.3 | 1.9 | 37.3 | 2.7 |
| XD-14891 | 45.2 | 4 | 46.8 | 2.1 |
| XD-14892 | 49.1 | 2.8 | 62.5 | 1.7 |
| XD-14893 | 41.7 | 2.3 | 49.7 | 6 |
| XD-14894 | 47 | 2.7 | 64.9 | 3 |
| XD-14895 | 53.3 | 4 | 67.2 | 2.3 |
| XD-14896 | 45.1 | 1.3 | 66.8 | 2.4 |
| XD-14897 | 74.3 | 8.9 | 87.7 | 4.6 |
| XD-14898 | 68.4 | 5.8 | 73 | 4.8 |
| XD-14899 | 44.3 | 6.4 | 55 | 1.2 |
| XD-14900 | 45.6 | 2.8 | 47.8 | 1.6 |
| XD-14901 | 47.9 | 12.1 | 41.4 | 1.7 |
| XD-14902 | 56.1 | 6.3 | 52.8 | 2.5 |
| XD-14903 | 52.1 | 4.2 | 46.6 | 2.7 |
| XD-14904 | 47 | 3.7 | 36.6 | 8.4 |
| XD-14905 | 40.6 | 2 | 40.6 | 3.2 |
| XD-14906 | 47.1 | 4.6 | 50.7 | 3.3 |
| XD-14907 | 57 | 4.1 | 51.1 | 2.7 |
| XD-14908 | 58.8 | 6.3 | 51.1 | 4 |
| XD-14909 | 47.1 | 2.8 | 50 | 2.6 |
| XD-14910 | 46.9 | 2.8 | 53.5 | 9.2 |
| XD-14911 | 61.7 | 3.6 | 55 | 4.3 |
| XD-14912 | 58 | 3.8 | 59.3 | 3.9 |
| XD-14913 | 72.1 | 5.5 | 73.3 | 6.4 |
| XD-14914 | 68.9 | 4.7 | 66.3 | 5.7 |
| XD-14915 | 47.4 | 5.1 | 59.1 | 9.5 |
| XD-14916 | 43.1 | 5.7 | 55.6 | 9.4 |
| XD-14917 | 43.4 | 4.6 | 42.7 | 4.3 |
| XD-14918 | 64.2 | 2.3 | 67.4 | 5.7 |
| XD-14919 | 62.5 | 6.6 | 61.8 | 3.8 |
| XD-14920 | 76.1 | 1.8 | 67.6 | 4.2 |
| XD-14921 | 64.4 | 3.9 | 73.9 | 7 |
| XD-14922 | 52.2 | 6.9 | 66.7 | 7.5 |
| XD-14923 | 48.7 | 2.6 | 56.3 | 3.8 |
| XD-14924 | 47.6 | 1 | 51.8 | 2.1 |
| XD-14925 | 51.7 | 3.7 | 56.5 | 6.2 |
| XD-14926 | 43 | 3.9 | 54.9 | 3.2 |
| XD-14927 | 53.3 | 6.2 | 64.3 | 8.2 |
| XD-14928 | 61.7 | 1.7 | 70.4 | 3.8 |
| XD-14929 | 54.7 | 3.9 | 64.4 | 2.8 |
| XD-14930 | 50.1 | 3 | 63.6 | 5.5 |
| XD-14931 | 52.9 | 3.9 | 62.4 | 4.9 |
| XD-14932 | 62.6 | 3.7 | 69 | 3.8 |
| XD-14933 | 62.2 | 5 | 66.7 | 3.3 |
| XD-14934 | 59.7 | 7.6 | 62 | 4.8 |
| XD-14935 | 60.5 | 4.1 | 65.9 | 7.5 |
| XD-14936 | 54.4 | 2.6 | 71.3 | 4.7 |
| XD-14937 | 61.2 | 5.5 | 74.1 | 2.9 |
| XD-14938 | 65.8 | 6.6 | 71.9 | 3.7 |
| XD-14939 | 61.9 | 7.8 | 73.8 | 2.6 |
| XD-14940 | 68.8 | 6.8 | 79.6 | 2.2 |
| XD-14941 | 57.8 | 4.1 | 69.7 | 3.1 |
| XD-14942 | 75.3 | 9.3 | 85.4 | 4.4 |
| XD-14943 | 69.8 | 4.2 | 77.7 | 6.7 |
| XD-14944 | 84.1 | 4.3 | 84.2 | 8.5 |
| XD-14945 | 53.5 | 3 | 55.2 | 2 |
| XD-14946 | 58 | 1.8 | 56.9 | 3.7 |
| XD-14947 | 59.2 | 2.2 | 59.2 | 1.3 |
| XD-14948 | 56.8 | 4.4 | 53.4 | 2.4 |
| XD-14949 | 51.7 | 2.5 | 52.4 | 2.3 |
| XD-14950 | 63.2 | 2.2 | 69.6 | 4.3 |
| XD-14951 | 53.9 | 2.7 | 62.6 | 3.8 |
| XD-14952 | 40.3 | 0.9 | 51.3 | 6.2 |
| XD-14953 | 46.6 | 2.5 | 56.1 | 4.1 |
| XD-14954 | 56.1 | 8.6 | 55.9 | 6.6 |

TABLE 5
siRNA Single Point Testing Data 200 pM

| siRNA Duplex ID | 0.2 nM_mean | 0.2 nM_SD |
|---|---|---|
| XD-14742 | 55.2 | 5.4 |
| XD-14743 | 49.9 | 3.2 |
| XD-14745 | 68.9 | 2.5 |
| XD-14747 | 59.3 | 5.8 |
| XD-14748 | 63.9 | 3.8 |
| XD-14754 | 75.9 | 3.2 |
| XD-14756 | 52 | 8.9 |
| XD-14757 | 57.2 | 6.7 |
| XD-14758 | 60.8 | 3.3 |
| XD-14759 | 60.3 | 3.4 |
| XD-14760 | 65.8 | 4.2 |
| XD-14762 | 61.7 | 7.7 |
| XD-14763 | 58.1 | 5.1 |
| XD-14765 | 72.6 | 6 |
| XD-14766 | 59.5 | 4.1 |
| XD-14767 | 66.2 | 3.5 |
| XD-14768 | 56.5 | 3.7 |
| XD-14773 | 73.1 | 4.5 |
| XD-14775 | 69.1 | 5.1 |
| XD-14776 | 62.5 | 1.8 |
| XD-14779 | 58.2 | 1.3 |
| XD-14786 | 51.1 | 1.4 |
| XD-14787 | 61.7 | 1.5 |
| XD-14788 | 58.1 | 4.7 |
| XD-14790 | 49.7 | 1 |
| XD-14791 | 51.2 | 4.3 |
| XD-14792 | 41.9 | 4.6 |
| XD-14793 | 62.2 | 8.4 |
| XD-14794 | 60.6 | 5.3 |
| XD-14795 | 75.9 | 7.3 |
| XD-14798 | 53.1 | 2.4 |
| XD-14799 | 60.4 | 2.2 |
| XD-14800 | 54.1 | 4 |
| XD-14801 | 59.7 | 13.7 |
| XD-14805 | 56.7 | 2.4 |
| XD-14807 | 66.9 | 7 |
| XD-14809 | 48.4 | 2.9 |
| XD-14810 | 54.5 | 4.6 |
| XD-14811 | 51.1 | 3.5 |
| XD-14812 | 62.3 | 6.6 |
| XD-14815 | 76.1 | 2 |
| XD-14816 | 71.8 | 1.7 |
| XD-14818 | 75.9 | 1.9 |
| XD-14819 | 57.2 | 2.6 |
| XD-14820 | 68.9 | 2.7 |
| XD-14822 | 63.7 | 0.7 |
| XD-14824 | 69.8 | 3.6 |
| XD-14825 | 52.5 | 2.2 |
| XD-14826 | 60.6 | 3.6 |
| XD-14829 | 67.7 | 4.5 |
| XD-14830 | 59 | 5.7 |
| XD-14834 | 67.7 | 2.8 |
| XD-14835 | 51.7 | 12.4 |
| XD-14837 | 63.4 | 10.1 |
| XD-14838 | 73.2 | 4 |
| XD-14839 | 65.7 | 1.9 |
| XD-14840 | 60.7 | 2.7 |
| XD-14841 | 65.5 | 2.2 |
| XD-14842 | 67.7 | 2 |
| XD-14843 | 76.7 | 9.6 |
| XD-14846 | 54.9 | 6.5 |
| XD-14847 | 69.6 | 1.7 |
| XD-14848 | 77.5 | 1.1 |
| XD-14850 | 74.4 | 3.2 |
| XD-14851 | 89.7 | 2.4 |
| XD-14853 | 77 | 3.2 |
| XD-14854 | 73 | 3.6 |
| XD-14855 | 82.4 | 4.2 |
| XD-14856 | 72.7 | 4.7 |
| XD-14857 | 54.4 | 3.6 |
| XD-14859 | 63.8 | 3.2 |
| XD-14860 | 52 | 2.3 |
| XD-14861 | 63.2 | 3.5 |
| XD-14863 | 72.3 | 3.1 |
| XD-14864 | 63.9 | 2.2 |
| XD-14875 | 63.1 | 2.9 |
| XD-14876 | 62.9 | 2.5 |
| XD-14878 | 66.1 | 3.8 |
| XD-14880 | 64.5 | 4.5 |
| XD-14882 | 52.7 | 2.8 |
| XD-14886 | 67.8 | 4.4 |
| XD-14887 | 63.1 | 2.3 |
| XD-14889 | 51.5 | 3.5 |
| XD-14890 | 52.3 | 0.6 |
| XD-14891 | 67.7 | 5.1 |
| XD-14893 | 51.7 | 2.4 |
| XD-14900 | 66.2 | 2.8 |
| XD-14901 | 55.3 | 1 |
| XD-14902 | 72.5 | 2.1 |
| XD-14903 | 69.5 | 2.5 |
| XD-14904 | 62.2 | 2.2 |
| XD-14905 | 63.9 | 3.9 |
| XD-14906 | 76.6 | 4.8 |
| XD-14907 | 77.2 | 8.1 |
| XD-14908 | 76.5 | 6.7 |
| XD-14909 | 75.1 | 7.7 |
| XD-14917 | 59.8 | 7.9 |
| XD-14924 | 68 | 5.5 |
| XD-14949 | 75.9 | 7.4 |
| XD-14952 | 75.8 | 5.2 |

[0296] Overall, the siRNA treatment data shows successful ATXN2 mRNA knockdown.

Confirmation of ATXN2 Protein Level Reduction by siRNA Treatment

[0297] To assess whether ATXN2 protein levels were also reduced by the informatically predicted siRNAs, 56 siRNAs were resynthesized (44 top ranked siRNAs by knockdown at 200 pM; 2 additional siRNAs near the top ranked, but having ATXN2L cross-reactivity (XD-14776) or mouse cross-reactivity (XD-14887) as characteristics which merited their re-testing; additional 10 siRNAs selected by a joint assessment of the ranking by knockdown at 20 nM dosed siRNA (from the top 55 ranked by knockdown), and also taking into account an informatic prediction of off-target likelihood. These siRNAs were synthesized to a reported purity of 80-85% (Dharmacon). As before, siRNAs were synthesized as 22 nucleotide guide and passenger strands, with a 20 nucleotide complementary sequence between guide base 1-20 and passenger bases 1-20, with 2 nucleotide 3′ overhangs on each strand, and introduced by transient transfection. Three additional controls were included. A non-targeting control (NTC) (Dharmacon, ON-Target plus Control Non-Targeting siRNA #1, D-001810-01-05) and a sequence targeting luciferase controlled for any nonspecific effects of siRNA treatment, including transfection reagents, on ATXN2 signal. For the luciferase control, sense sequence: GGAATTATAATGCTTATCTATA (SEQ ID NO:536); antisense sequence: TAGATAAGCATTATAATTCCTA (SEQ ID NO:537). A ‘SMARTPool’ (SMP), a combination of 4 siRNAs targeting ATXN2 (Dharmacon; ON-TARGETplus Human ATXN2 siRNA SMARTPool, L-011772-00-0005) was used as a positive control for specific targeting of ATXN2. Both the NTC and SMARTPool siRNAs are chemically modified to limit off-target effects.

[0298] An imaging based assay used indirect immunofluorescence signal by antibodies against ATXN2 to quantify ATXN2 levels. For these experiments U2OS cells were selected because of their large and uniform cell bodies, which permit good visualization of Ataxin-2 levels in the cytoplasm. siRNAs were introduced by transient transfection, and then 3 days later cells were fixed in paraformaldehyde, and then blocked and immunostained for Ataxin-2 and counterstained with Hoechst dye 33342 to identify cell nuclei.

[0299] Images were segmented using custom pipelines developed in Cell Profiler. First, cell nuclei are identified and outlined based on Hoechst 33342 signal. Subsequently, the nuclei outline is expanded to generate a ring. Within this ring, for each cell, the signal from the indirect immunofluorescence channel corresponding to a fluorescent secondary antibody binding to anti-Ataxin-2 is quantified. To calculate the ATXN2 signal for a well, the mean across cells in the well (typically 1000-3500 cells imaged/well) of cellular ATXN2 signal was calculated. The upper quartile ATXN2 signal within the cytoplasmic region was used. By taking the upper quartile of signal, this avoids the influence of signal from segmented regions of the image that may inadvertently not contain cells.

[0300] Cells were dosed with 20 or 1 nM siRNA in 96-well format, across multiple plates with controls in each plate. Background was subtracted by, within each imaging plate, wells stained with secondary antibody but not primary antibody, and not transfected. This reflects background intensity due to nonspecific binding of the secondary antibody. Ataxin-2 intensity values were normalized to those from wells transfected with non-targeting control (‘NTC’). From this, normalized ATXN2 signal represents a proxy for degree of protein level knockdown. Importantly, ATXN2 signal was similar for wells treated with luciferase targeting siRNA as with cells treated with NTC control. Note that the ‘NTC’ control (Dharmacon) chemistry is modified to reduce off-target effects whereas all ATXN2-targeting and luciferase-targeting siRNAs tested were unmodified. FIG. 9 quantifies knockdown of ATXN2 signal for siRNAs at 20 and 1 nM dose levels. FIGS. 10A and 10B show representative images from the knockdown experiments, with evidence of clear reduction of Ataxin-2 intensity from the indicated siRNAs. FIG. 11 plots the siRNAs protein knockdown data, at either 20 or 1 nM siRNA, as a function of ATXN2 transcript position. Almost all of these top siRNAs yielded substantial knockdown of siRNA at the protein level. At 1 nM, all of these top siRNAs exceeded the knockdown performance of the SMARTPool siRNA. Tables 6 and 7 display the mean and standard deviation of ATXN2 signal across wells. Sequences of the siRNAs from Tables 6 and 7 are provided in Table 1. For mean and SD calculations, outliers were excluded (outliers defined as wells where value deviated from the median value across wells by more than 1.5 standard deviations and by greater than 1000 normalized ATXN2 signal). Outlier wells are highlighted in FIG. 9.

TABLE 6
ATXN2 protein knockdown, measured by high content
imaging, after SiRNA treatment at 20 nM

| | | Mean | Standard | |
|---|---|---|---|---|
| Treatment/ | Dose | ATXN2 | Deviation | |
| Immunostain | in nM | Signal | ATXN2 Signal | N |
| no_primary_no_ | 20 | −0.7 | 2.2 | 23 |
| secondary | | | | |
| no_primary_ | 20 | 0 | 1.3 | 24 |
| secondary | | | | |
| NTC | 20 | 100 | 6.1 | 64 |
| primary_no_ | 20 | 1.7 | 1.9 | 24 |
| secondary | | | | |
| primary_secondary | 20 | 92.5 | 7.2 | 46 |
| SMP | 20 | 23.4 | 5.8 | 61 |
| XD-14742 | 20 | 13.6 | 3.5 | 4 |
| XD-14743 | 20 | 20.7 | 4.9 | 4 |
| XD-14747 | 20 | 11.4 | 1.9 | 3 |
| XD-14756 | 20 | 6.9 | 3 | 3 |
| XD-14757 | 20 | 18.2 | 6.9 | 4 |
| XD-14758 | 20 | 14.6 | 2.3 | 4 |
| XD-14759 | 20 | 11.1 | 3.2 | 4 |
| XD-14762 | 20 | 13.7 | 5.9 | 4 |
| XD-14763 | 20 | 7.4 | 5.7 | 4 |
| XD-14766 | 20 | 15.7 | 5 | 4 |
| XD-14768 | 20 | 11.6 | 3.9 | 4 |
| XD-14775 | 20 | 14.1 | 3.3 | 4 |
| XD-14776 | 20 | 15.9 | 1.7 | 4 |
| XD-14779 | 20 | 13.2 | 1.5 | 3 |
| XD-14786 | 20 | 19.8 | 4.9 | 3 |
| XD-14787 | 20 | 12.7 | 6.7 | 4 |
| XD-14788 | 20 | 16.7 | 7.4 | 4 |
| XD-14790 | 20 | 17.9 | 8.1 | 4 |
| XD-14791 | 20 | 15.6 | 5.4 | 4 |
| XD-14792 | 20 | 12.5 | 9.1 | 4 |
| XD-14793 | 20 | 17.4 | 4.4 | 4 |
| XD-14794 | 20 | 14.5 | 4.2 | 4 |
| XD-14798 | 20 | 15.9 | 4.7 | 3 |
| XD-14799 | 20 | 14.5 | 1.8 | 4 |
| XD-14800 | 20 | 13.1 | 5.7 | 3 |
| XD-14801 | 20 | 9 | 6.1 | 4 |
| XD-14805 | 20 | 22.2 | 4.3 | 4 |
| XD-14809 | 20 | 44.2 | 4.9 | 4 |
| XD-14810 | 20 | 24.8 | 6.4 | 4 |
| XD-14811 | 20 | 29 | 6.3 | 4 |
| XD-14819 | 20 | 27.1 | 9.1 | 4 |
| XD-14822 | 20 | 29.4 | 4.6 | 4 |
| XD-14825 | 20 | 19.9 | 5.2 | 4 |
| XD-14826 | 20 | 22.2 | 7.5 | 4 |
| XD-14830 | 20 | 11.7 | 5.4 | 4 |
| XD-14834 | 20 | 7.5 | 4.3 | 4 |
| XD-14835 | 20 | 6.2 | 3.5 | 3 |
| XD-14837 | 20 | 13.3 | 4.8 | 4 |
| XD-14839 | 20 | 23.4 | 0.9 | 4 |
| XD-14840 | 20 | 19.7 | 4.2 | 4 |
| XD-14841 | 20 | 25.3 | 2.7 | 4 |
| XD-14843 | 20 | 16.8 | 2.8 | 4 |
| XD-14846 | 20 | 11.2 | 2 | 3 |
| XD-14847 | 20 | 8.9 | 2.8 | 4 |
| XD-14850 | 20 | 21.6 | 3.1 | 4 |
| XD-14857 | 20 | 16.8 | 7.4 | 4 |
| XD-14860 | 20 | 8.7 | 4 | 3 |
| XD-14882 | 20 | 14.2 | 1.3 | 3 |
| XD-14887 | 20 | 19.2 | 4.2 | 4 |
| XD-14889 | 20 | 16.2 | 2.6 | 4 |
| XD-14890 | 20 | 13.8 | 4.9 | 4 |
| XD-14893 | 20 | 24.7 | 12.4 | 4 |
| XD-14901 | 20 | 17.7 | 4 | 4 |
| XD-14904 | 20 | 15.9 | 5.8 | 4 |
| XD-14905 | 20 | 13.6 | 5.7 | 3 |
| XD-14917 | 20 | 18.7 | 5.9 | 4 |
| XD-LucControl | 20 | 101 | 4.8 | 3 |

TABLE 7
ATXN2 protein knockdown, measured by high content imaging, after
siRNA treatment at 1 nM

| Treatment/ | Dose | Mean ATXN2 | Standard Deviation | |
|---|---|---|---|---|
| Immunostain | in nM | Signal | ATXN2 Signal | N |
| no_primary_no_ | 1 | −1.3 | 2.8 | 29 |
| secondary | | | | |
| no_primary_secondary | 1 | 0 | 2.7 | 30 |
| NTC | 1 | 99 | 17.1 | 78 |
| primary_no_secondary | 1 | 1.4 | 2.8 | 28 |
| primary_secondary | 1 | 97.9 | 10 | 62 |
| SMP | 1 | 50.1 | 7.1 | 78 |
| XD-14742 | 1 | 27.2 | 5.5 | 5 |
| XD-14743 | 1 | 18.1 | 3.3 | 4 |
| XD-14747 | 1 | 21.7 | 3.8 | 5 |
| XD-14756 | 1 | 18.2 | 5.5 | 4 |
| XD-14757 | 1 | 26.7 | 3.6 | 5 |
| XD-14758 | 1 | 19.8 | 5.2 | 5 |
| XD-14759 | 1 | 16 | 3.2 | 5 |
| XD-14762 | 1 | 18.3 | 2.3 | 5 |
| XD-14763 | 1 | 20.7 | 3.8 | 5 |
| XD-14766 | 1 | 19.7 | 2.9 | 5 |
| XD-14768 | 1 | 25.5 | 7.6 | 5 |
| XD-14775 | 1 | 28 | 2.5 | 4 |
| XD-14776 | 1 | 25.4 | 4.7 | 5 |
| XD-14779 | 1 | 26.8 | 4.8 | 5 |
| XD-14786 | 1 | 24.4 | 4 | 4 |
| XD-14787 | 1 | 23.2 | 4.6 | 5 |
| XD-14788 | 1 | 25.7 | 5.7 | 4 |
| XD-14790 | 1 | 22.9 | 5.6 | 5 |
| XD-14791 | 1 | 25.5 | 5.9 | 5 |
| XD-14792 | 1 | 18.6 | 5.7 | 5 |
| XD-14793 | 1 | 37.6 | 4 | 5 |
| XD-14794 | 1 | 23.4 | 4.7 | 5 |
| XD-14798 | 1 | 20.2 | 6.1 | 4 |
| XD-14799 | 1 | 29.5 | 3.7 | 5 |
| XD-14800 | 1 | 22.6 | 1.8 | 4 |
| XD-14801 | 1 | 16.2 | 4.5 | 4 |
| XD-14805 | 1 | 35.4 | 2.5 | 5 |
| XD-14809 | 1 | 40 | 8.5 | 5 |
| XD-14810 | 1 | 40.7 | 4.3 | 5 |
| XD-14811 | 1 | 42 | 14.5 | 4 |
| XD-14819 | 1 | 36.6 | 0.7 | 4 |
| XD-14822 | 1 | 31.5 | 5.6 | 5 |
| XD-14825 | 1 | 28.2 | 3.4 | 5 |
| XD-14826 | 1 | 32.7 | 6.5 | 4 |
| XD-14830 | 1 | 26.6 | 4.6 | 5 |
| XD-14834 | 1 | 19.7 | 4.9 | 5 |
| XD-14835 | 1 | 20.3 | 4.9 | 5 |
| XD-14837 | 1 | 19 | 4.6 | 5 |
| XD-14839 | 1 | 21.6 | 3.1 | 4 |
| XD-14840 | 1 | 20.7 | 5.4 | 5 |
| XD-14841 | 1 | 29.8 | 4.9 | 5 |
| XD-14843 | 1 | 26.3 | 2.5 | 4 |
| XD-14846 | 1 | 23.1 | 5.8 | 5 |
| XD-14847 | 1 | 15.1 | 2.9 | 5 |
| XD-14850 | 1 | 26.4 | 8.2 | 5 |
| XD-14857 | 1 | 26.1 | 3.8 | 5 |
| XD-14860 | 1 | 18.5 | 4 | 5 |
| XD-14882 | 1 | 23.5 | 4.9 | 5 |
| XD-14887 | 1 | 22.3 | 4.2 | 5 |
| XD-14889 | 1 | 24.4 | 7 | 5 |
| XD-14890 | 1 | 21.6 | 2.4 | 4 |
| XD-14893 | 1 | 17.3 | 2 | 3 |
| XD-14901 | 1 | 25.6 | 2.9 | 4 |
| XD-14904 | 1 | 19.9 | 2.1 | 5 |
| XD-14905 | 1 | 26.5 | 2.5 | 5 |
| XD-14917 | 1 | 19.2 | 2.7 | 5 |
| XD-LucControl | 1 | 114.6 | 12.1 | 5 |

[0301] Remarkably, 53 out of 56 of the ATXN2-targeting sequences achieved greater than 60% ATXN2 signal knockdown by this assay. In this assay, nonspecific antibody signal was not corrected. In subsequent assays (see below), ATXN2 knockout cells were used as controls demonstrating that some ATXN2 antibody background is present. Therefore, the ATXN2 protein level knockdown values here may underestimate the amount of protein knockdown caused by the ATXN2-targeting siRNA treatments.

Selection of Top-Ranked Sequences for Evaluation in siRNA Dose Response and in miRNA Backbones

[0302] To assess the potency of guide sequences targeting ATXN2, dose-response profiling of siRNAs and testing of guide sequences in miRNA format of 22 top sequences was conducted. To select top sequences for this detailed profiling, rankings of RNA knockdown for siRNAs at 20 nM and 200 pM were first assessed. In addition to this ranking of RNA knockdown, a method for predicting the number of off-target transcripts that would be influenced by the guide sequence was used, generating a probability of off-targeting score (POTS). https://sispotr.icts.uiowa.edu/sispotr/tools/lookup/evaluate.html) (Boudreau et al., Nucleic Acids Research 2013 41(1):e9). This score considers the seed sequence of the siRNA, and as such is supplementary to the initial assessment of off-target prediction based on the number of transcripts with 2 or fewer mismatches to the first 19 nucleotides of the guide sequence. Going down the knockdown ranks of siRNAs, sequences with increasingly stringent POTS score were favored. Additional criteria evaluated were: proximity to the region of ATXN2 complementarity for other guide sequences; re-examination of the number of transcripts closely complementary to nucleotides 2-19 were taken into account and resulted in the exclusion of two other sequences. The specific predicted off-targets were not examined for the selection of sequences for these experiments.

[0303] In addition to top-ranked sequences, two low-performing siRNAs (XD-14781 and XD-14949) that had low mRNA knockdown when assessed as siRNAs at 20 nM or 1 nM, were included to confirm the range and sensitivity of downstream assays.

siRNA Dose Response Versus ATXN2 mRNA Knockdown Testing

[0304] Dose response profiling was performed by testing dilution series of siRNAs transfected into HepG2 cells (FIG. 12), as described above for single-dose experiments. As expected, sequences XD-14781 (guide SEQ ID NO:90; passenger SEQ ID NO:89) and XD-14949 (guide SEQ ID NO:426; passenger SEQ ID NO:425), which had poor performance when assessed at 20 and 1 nM, had low potency and reduced maximal knockdown when assessed in dose response. IC50s of all other top-ranked siRNAs separated from these values. Two batches of testing were performed. Top sequences from one of the batches were estimated to have concentrations achieving half-maximal knockdown of <10 pM, indicating that the top-ranked siRNAs are highly potent. Performances of siRNAs had some dissimilarities between the batches but this was not investigated further, and the sequences were advanced into further testing in miRNA format. This miRNA testing, discussed below, showed that the lowest performing sequences from each batch were separated from the highest performing sequences in efficacy of ATXN2 protein lowering, but that the performance of top siRNAs from the two batches were similar. The miRNA testing is therefore regarded as more relevant for precise ranking of sequences.

Design and Production of ATXN2-Targeting Sequences in miRNA Backbones

[0305] Following identification of active siRNA sequences, siRNAs were embedded in miRNAs for expression from DNA vectors. The miR-155 and miR-1-1 backbones were considered.

[0306] The miR-155 was originally identified as a promising scaffold for construction of RNA polymerase II-based miRNA vectors due to its location within a conserved non-coding RNA⁸. After initial identification and design of miR-155 shRNA, subsequent sequence improvements increased microprocessor cleavage³. Many groups took the miR-155 scaffold to preclinical use in mice^{10,11}, sheep¹² and non-human primates¹³, enabling gene therapy approaches in genetically-driven human disease.

[0307] Initial experiments were conducted using a version of the miR-155 scaffold that, in one previous report, was engineered into an artificial mRNA and used in a mouse in vivo proof of concept study to knockdown HTT¹⁰. Small RNA sequencing had demonstrated high strand bias by this miRNA backbone¹⁰. ATXN2 targeting guide sequences and controls were incorporated into this scaffold sequence, which was termed “mR-155M” and assayed for protein knockdown after transfection of U2OS cells.

[0308] To rationally improve miR-155, human genomic sequence was examined, and the span of flanking miR-155 sequence to be used was defined by the region surrounding miR-155 with high evolutionary conservation across similar species. That is, a plot of sequence conservation versus position was visualized, and the genomic position from the endogenous miR-155 at which this sequence conservation dropped off was used to determine how much flanking context around the miR-155 stem structure should be included. Next, the mIR-155 loop was examined for features which might impact the use of this miR in different expression systems. A homotetrameric UUUU in the miR-155 loop was noted. UUUU sequences have been reported to induce Polymerase III termination¹⁴, which would lead to aberrantly truncated miRNAs which do not undergo stem pairing. To interrupt this homotetrameric UUUU, an apical UGU motif within the miR-155 loop was added. This motif additionally has been reported to enhance miRNA processing.^{1,2} In addition to previously engineered UG and CNNC motifs³, a basal stem mismatched GHG motif² was added to improve precise processing.

[0309] To expand the number of amiRNA scaffolds beyond the miR-155 backbones, backbones from endogenous miRNAs reported to have high processing precision were prioritized. The miR-1-1 backbone ranks among the highest in processing precision according to reference:¹⁵, has high strand bias by small RNAseq⁵, and the guide strand is on the 3 prime arm of the miRNA stem, which may improve processing accuracy compared to 5 prime-arm positioned guide strands¹⁶. Natively integrated favorable sequence motifs include a basal mismatched GHG motif and downstream CNNC motif. It also has a short context for sequencing and has been successfully engineered for artificial miRNA expression in Drosophila models¹⁷.

[0310] Additional miRNA scaffolds that may be considered for the amiRNAs of the present disclosure include:
[0311] miR-100 and miR-190a—high throughput screen identified high on-target/off-target ratio¹⁵.
[0312] miR-124 and miR-132—both motor-neuron expressed miRNAs do not change expression in an ALS rat model¹⁸. The cell-type specific expression and consistent levels throughout ALS disease course are favorable miRNA characteristics. Neuronal specificity has been confirmed in a sRNAseq cross-tissue expression database¹⁹ (https://ccb-web.cs.uni-saarland.de/tissueatlas/).
[0313] miR-9—neuron-specific expression²⁰.
[0314] miR-138-2, miR-122, miR-130a, and miR-128 were selected to be naturally asymmetric (either exclusively 5′ or 3′ strand is observed in small RNAseq datasets), highly homogeneous (i.e. high “5′ homogeneity score”¹⁵), not reported to undergo post-transcriptional regulation (e.g. which occurs for clustered miRNAs), are consensus miRNAs on miRBase, have flexible loop structure and simple duplex stem.

[0315] To further mimic the miRNA backbones, bulges and mismatches can be inserted into the guide:passenger strand duplex in a manner to replicate the bulge pattern observed in endogenous miRNAs, but applied to artificial miRNAs targeting ATXN2. The modifications that can be done to the passenger strand to introduce these native-miRNA mimicking structures are provided in Table 8.

TABLE 8
Design Rules for Exemplary miRNA formats

| miR | Modifications to passenger sequence |
|---|---|
| miR-1-1 | Mismatch base 2 \| Bulge mismatch transversion base 19 \| |
| | Insert a base between bases 18 and 19, either G or C but |
| | not complementary to the guide |
| miR155 | Delete bases 9 and 13 of passenger |
| (M or E) | |
| miR100 | Bulge mismatch transversion base 11 \| Bulge mismatch |
| | transition bases 7, 18 \| add GU wobble base 17 \| Mismatch |
| | base 22 |
| miR124 | Mismatch base 3 \| Bulge mismatch transition bases 2, 17 \| |
| | Bulge mismatch transversion 12, 16 |
| miR138-2 | Mismatch bases 5, 21 \| Bulge mismatch bases 6 \| Add GU |
| | wobble base 13 \| delete bases 7, 22 |
| miR122 | Bulge mismatch transition base 12 \| Bulge mismatch |
| | transversion bases 20, 21 |
| miR-128 | Truncate guide to 21 bp \| Mismatch bases 1, 2, 12 \| Bulge |
| | mismatch transversion bases 3, 11, 13 \| Insert 2 bases |
| | between bases 20 and 21, not complementary to the guide \| |
| | add GU wobbles bases 5, 7 |
| miR130a | Mismatch base 2 \| Add GU wobbles bases 18, 19 \| bulge |
| | mismatch transversion base 11 \| Bulge mismatch transition |
| | base 22 |
| miR 16-2 | Bulge mismatch transversion bases 11, 12 \| Mismatch base |
| | 22 |

Note:
For the above, ‘passenger’ sequence refers to a sequence complementary to the 22 nucleotides of the guide sequence. This is not the same as passenger sequences as used in describing siRNA duplexes. Mismatch refers to the following substitution rule: G → C, C → G, A → T, T → A. Bule mismatch transition refers to the rule: T → C, C → A, A → C, G → A. Bulge mismatch transversion refers to the rule: G → T, C → A, A → C, T → G. Add GU wobble refers to the rule: If base is C, then convert to T.

Initial Testing of ATXN2 Targeting Guide Sequences in miR155-M and miR1-1 Backbones

[0316] As an initial test of the ability of the Atxn2 targeting siRNAs to knock down Atxn2 when embedded in a miRNA context, the guide sequence of XD-14792 (SEQ ID NO:112), which had the highest ranked ATXN2 mRNA knockdown when dosed at 200 pM as an siRNA, was embedded in several miRNA contexts as shown in Table 9. The amiRNA DNA sequences are provided in Table 9 as SEQ ID NOS:538-543. The corresponding amiRNA RNA sequences are provided in Table 9 as SEQ ID NOS:1109-1114, respectively.

TABLE 9
XD-14792 sequences embedded in amiRNAs

| | Target/ | Guide | | miR | Artificial miRNA | Artificial miRNA |
|---|---|---|---|---|---|---|
| Name | Type | Sequence | Variation | Backbone | (DNA Sequence) | (RNA Sequence) |
| XD-14792_miR1-1 | ATXN2 | AUUAACUACUCUU | | 1-1 | CATGCAGACTGCCTGCTTGGGTA | CAUGCAGACUGCCUGCUUGGGU |
| | | UGGUCUGAA | | | CAGACCAAAGAGTAGTCGAATTA | ACAGACCAAAGAGUAGUCGAAU |
| | | [SEQ ID NO: 112] | | | TGGACCTGCTAAGCTAATTAACT | UAUGGACCUGCUAAGCUAAUUA |
| | | | | | ACTCTTTGGTCTGAACTCAGGCC | ACUACUCUUUGGUCUGAACUCA |
| | | | | | GGGACCTCTCTCGCCGCACTGAG | GGCCGGGACCUCUCUCGCCGCAC |
| | | | | | GGGCACTCCACACCACGGGGGCC | UGAGGGGCACUCCACACCACGG |
| | | | | | [SEQ ID NO: 538] | GGGCC |
| | | | | | | [SEQ ID NO: 1109] |
| XD-14792_miR1-1 | ATXN2 | AUUAACUACUCUU | E | 1-1 | CATGCAGACTGCCTGCTTGGGTA | CAUGCAGACUGCCUGCUUGGGU |
| enhanced | | UGGUCUGAA | | | CAGACCAAAGAGTAGTCGAATTA | ACAGACCAAAGAGUAGUCGAAU |
| | | [SEQ ID NO: 112] | | | TGGACCTGCTAAGCTAATTAACT | UAUGGACCUGCUAAGCUAAUUA |
| | | | | | ACTCTTTGGTCTGAACTCAGGCC | ACUACUCUUUGGUCUGAACUCA |
| | | | | | GGGACCTCTTCCGCCGCACTGAG | GGCCGGGACCUCUUCCGCCGCAC |
| | | | | | GGGCACTCCACACCACGGGGGCC | UGAGGGGCACUCCACACCACGG |
| | | | | | [SEQ ID NO: 539] | GGGCC |
| | | | | | | [SEQ ID NO: 1110] |
| XD-14792_miR155 | ATXN2 | AUUAACUACUCUU | | 155 | CCTGGAGGCTTGCTGAAGGCTGT | CCUGGAGGCUUGCUGAAGGCUG |
| | | UGGUCUGAA | | | ATGCTGATTAACTACTCTTTGGTC | UAUGCUGAUUAACUACUCUUUG |
| | | [SEQ ID NO: 112] | | | TGAATTTTGGCCACTGACTGATTC | GUCUGAAUUUUGGCCACUGACU |
| | | | | | AGACCAAGGTAGTTAATCAGGAC | GAUUCAGACCAAGGUAGUUAAU |
| | | | | | ACAAGGCCTGTTACTAGCACTCA | CAGGACACAAGGCCUGUUACUA |
| | | | | | CATGGAACAAATGGCCACCGG | GCACUCACAUGGAACAAAUGGC |
| | | | | | [SEQ ID NO: 540] | CACCGG |
| | | | | | | [SEQ ID NO: 1111] |
| XD14792_911_miR155 | ATXN2 | AUUAACUAGAGUU | | 155 | CCTGGAGGCTTGCTGAAGGCTGT | CCUGGAGGCUUGCUGAAGGCUG |
| | 911 | UGGUCUGAA | | | ATGCTGATTAACTAGAGTTTGGT | UAUGCUGAUUAACUAGAGUUUG |
| | Control | [SEQ ID NO: 544] | | | CTGAATTTTGGCCACTGACT | GUCUGAAUUUUGGCCACUGACU |
| | | | | | GATTCAGACCAACCTAGTTAATC | GAUUCAGACCAACCUAGUUAAU |
| | | | | | AGGACACAAGGCCTGTTACTAGC | CAGGACACAAGGCCUGUUACUA |
| | | | | | ACTCACATGGAACAAATGGC | GCACUCACAUGGAACAAAUGGC |
| | | | | | CACCGG | CACCGG |
| | | | | | [SEQ ID NO: 541] | [SEQ ID NO: 1112] |
| XD-14792_SScr | ATXN2 | AUUAACUAAGUAU | | 155 | CCTGGAGGCTTGCTGAAGGCTGT | CCUGGAGGCUUGCUGAAGGCUG |
| miR155 | SScr | CGGUCUCUU | | | ATGCTGATTAACTAAGTATCGGT | UAUGCUGAUUAACUAAGUAUCG |
| | | [SEQ ID NO: 545] | | | CTCTTTTTTGGCCACTGACTGAAA | GUCUCUUUUUUGGCCACUGACU |
| | | | | | GAGACCATATTAGTTAATCAGGA | GAAAGAGACCAUAUUAGUUAAU |
| | | | | | CACAAGGCCTGTTACTAGCACTC | CAGGACACAAGGCCUGUUACUA |
| | | | | | ACATGGAACAAATGGCCACCGG | GCACUCACAUGGAACAAAUGGC |
| | | | | | [SEQ ID NO: 542] | CACCGG |
| | | | | | | [SEQ ID NO: 1113] |
| XD-14792_miR155 | ATXN2 | AUUAACUACUCUU | S | 155 | CCTGGAGGCTTGCTGAAGGCTGT | CCUGGAGGCUUGCUGAAGGCUG |
| sealed | | UGGUCUGAA | | | ATGCTGATTAACTACTCTTTGGTC | UAUGCUGAUUAACUACUCUUUG |
| | | [SEQ ID NO: 112] | | | TGAATTTTGGCCACTGACTGATTC | GUCUGAAUUUUGGCCACUGACU |
| | | | | | AGACCAAAGAGTAGTTAATCAGG | GAUUCAGACCAAAGAGUAGUUA |
| | | | | | ACACAAGGCCTGTTACTAGCACT | AUCAGGACACAAGGCCUGUUAC |
| | | | | | CACATGGAACAAATGGCCACC | UAGCACUCACAUGGAACAAAUG |
| | | | | | [SEQ ID NO: 543] | GCCACC |
| | | | | | | [SEQ ID NO: 1114] |

In the variation column: “E” refers to “enhanced,” “S” refers to ‘sealed’

[0317] In Table 9, the guide sequences (including the guide sequence, any variants, as well as the parental guide sequence from which they are derived) are shown in RNA form, and the artificial miR sequence is provided in both RNA format, and for when embedded in the vector is shown in DNA form. The miR backbones used include: (a) miR155, preserving a bulge format reported in (Fowler et al., Nucleic Acids Res. (2015) 44:e48); (b) miR155, with no sequence bulges, yielding a perfectly complementary stem (“sealed”); (c) miR1-1, preserving a native bulge format as in the endogenous miRNA; and (d) miR1-1 with the “Enhanced” variation, including a modification in the 3′ arm that in other miRNAs was previously reported to enhance processing (Auyeung et al., Cell 2013). FIG. 13 shows one of the predicted RNA folds of the miRNA stems of several of the constructs, using the web server mfold. Bulges in the stem in the region including or apposed to the guide sequence are apparent, which are designed to mimic the native mismatches of the endogenous forms of the microRNAs from which derive the surrounding context for the guide sequence. As controls (“911 controls”), bases 9, 10, and 11 of XD-14792 guide sequence were modified to be the complementary bases (that is, substituting A->T, T->A, C->G, or G->C); or (“SScr”), in which all bases except bases 1-7 were scrambled. In both cases, any seed-mediated off-target activity (deriving from bases 1-7) should be preserved, whereas the on-target Atxn2 slicing activity should be blocked.

[0318] pLVX-EF1A_mCherry-miR-1-1-XD_14890-WPRE_CMV (SEQ ID NO:546) is a representative lentiviral vector that can be used for expressing these artificial microRNAs. Nucleotides 4275-4412 of SEQ ID NO:546 (XD-14890 guide sequence in a miR-1-1 backbone) can be substituted with another artificial miRNA of interest. In this lentiviral vector suitable for packaging into lentivirus, an EF1-alpha promoter drives expression of a mCherry protein. After a stop codon, the amiRNA stem is expressed downstream within a 3′ UTR. Downstream of that a WPRE element (Woodchuck Hepatitis Virus Posttranscriptional Regulatory Element) enhances the stability of the transcript. Adapters may be included upstream or downstream of the artificial miRNA construct to facilitate cloning and downstream detection of the sequences, but these adapters are not expected to influence the performance of the microRNA. A CMV promoter (as in sequence shown), or a PGK promoter (as in plasmids transfected for data shown FIG. 14), downstream, drives expression of the puromycin resistance protein for puromycin selection in mammalian cells. This is a similar design to the vector used in (Kampmann et al., PNAS 2015).

[0319] pcDNA3.1 NEGFP STOP ATXN2 3′UTR.gb (SEQ ID NO:547) represents a plasmid used to generate a GFP-ATXN2 reporter line. A CMV promoter was used to drive the expression of a transcript encoding enhanced green fluorescent protein (EGFP). A stop codon at the end of the EGFP open reading frame was followed by the ATXN2 sequence, but removing the initial ATG such that the sequence is expected to not be translated. A separate SV40 promoter downstream drives the expression of the NeoR/KanR protein product which enabled selection of U2OS cells stably integrating the plasmid by G418 selection. EGFP fluorescence was bright and diffuse, and not restricted to the cytoplasm as expected if the ATXN2 protein was translated and fused to the EGFP. Several lines were generated by single-cell cloning after G418 selection, and one line ultimately selected based on uniform fluorescent signal distribution by FACS as well as a larger differential between control-transfected (siNTC) and ATXN2 siRNA-transfected cells.

[0320] Constructs with the artificial miRNAs noted above were transfected into U2OS cells stably expressing the GFP-Atxn2 reporter by transient transfection (lipofectamine 3000). Four days later, GFP-ATXN2 levels were quantified by fluorescence automated cell sorting (FACS), gating cells by the expression of the mCherry encoded on the miRNA vector to isolate cells expressing the artificial miRNA construct. FIG. 14 shows median fluorescence intensity signal of GFP intensity. XD-14792 sequences embedded in artificial miRNA backbones miR-155 or miR-1-1 considerably reduced ATXN2 GFP reporter intensity relative to cells expressing control constructs (XD-14792 911 and XD-14792 Sscr, embedded in the miR-155 stem backbone). A ‘sealed’ XD-14792 construct in a miR-155 backbone, in which the stem is perfectly complementary (FIG. 14) did not reduce the ATXN2 GFP reporter signal as much as did XD-14792 when embedded in either miR-155 or miR-1-1 with bulged residues.

Expanded Screening of ATXN2 Targeting Sequences in Artificial microRNA Vectors in Lentiviral Format

[0321] Given the encouraging results with the knockdown of the ATXN2 GFP reporter, a set of ATXN2 targeting sequences was cloned into the artificial microRNA expressing vector described above (SEQ ID NO:546). The same set of ATXN2 targeting sequences as were tested in dose-response testing for mRNA knockdown were incorporated into plasmids to enable lentiviral packaging. Vectors were packaged into lentivirus (see methods below) and transduced into unmodified U2OS cells or U2OS cells deficient for ATXN2 (described below) in a 96-well format, across multiple plates. Each plate had controls to enable plate-wise signal normalization. 3.5 days after transduction, cells were fixed with paraformaldehyde, blocked and stained with anti-ATXN2 antibodies, anti-mCherry antibodies, and Hoechst dye (33342) to demarcate cellular nuclei, and ATXN2 signal was quantified by image segmentation and signal intensity measurement as described above. Transduced and untransduced cells were differentiated by anti-mCherry signal. FIG. 15 shows histograms of the expected mCherry signal for untransduced cells as well as wildtype transduced cells. The threshold was set such that the signal from untransduced wild-type cells did not exceed this threshold, but most of the cells in the right peak of the bimodally distributed signals (right panel, wild-type transduced cells) were considered positive.

[0322] ATXN2 signal was subtracted for background measured in U2OS cells with the ATXN2 gene disrupted by CRISPR and in which ATXN2 protein had been verified to be eliminated by Western analysis. FIGS. 20-21 show the data for the knockout generation process. FIG. 20 shows Western and FACS analysis of Ataxin-2 signal in cells nucleofected with Cas9-gRNA complexes targeting Ataxin-2 or control targets. Robust reduction of Ataxin-2 protein is seen with multiple guides, consistent with editing and disruption of the Ataxin-2 gene. FIG. 21A shows the workstream to generate clonal ATXN2 knockout cells, and FIG. 21B shows Western analysis of single-cell clones derived from Cas9-gRNA nucleofected cells, from which clone 43 was confirmed to be null for Ataxin-2 and selected for further use. The clone was sequenced by Sanger sequencing, and using the ICE tool (Synthego), a mixture of disrupting mutations consistent with disruption of the ATXN2 alleles was confirmed.

[0323] As shown in FIG. 16, the signal in ATXN2 deleted cells was slightly increased relative to wild-type cells that were treated with secondary antibody but not primary anti-Ataxin-2 antibody, suggesting some nonspecific, background binding of the ATXN2 antibody. These cells were not transduced with virus. After background subtraction, signal was normalized relative to ATXN2 signal in untransduced wild-type cells.

[0324] FIG. 17 shows well-level quantification of ATXN2 signal intensities across artificial microRNA constructs, with representative images shown in FIG. 18. Transduced cells were identified by anti-mCherry levels exceeding the threshold defined above. A median of 3355 cells per well were mCherry positive and included for ATXN2 signal calculation, with a range of 2469-4582 cells and standard deviation of 391 cells per well.

[0325] Table 10 shows mean and standard deviations of ATXN2 signals, normalized as above, for sequences, embedded either in the enhanced miR-155 backbone or the miR1-1 backbone (sequences provided in Table 11). In general, for most but not all sequences, ATXN2 knockdown performance was superior when the guide sequence was embedded in the miR1-1 backbone. None of the 911 controls, where the artificial microRNA was engineered such that guide bases 9, 10 and 11 were complemented (A->T, T->A, C->G, or G->C), exhibited knockdown, indicating that the reduction in ATXN2 signal is dependent on the direct RNA interference activity of the microRNAs on the endogenous ATXN2 transcript. Additionally, protein level knockdown across guide sequences, when examined in the miR-1-1 backbone, correlated with mRNA knockdown in HepG2 cells after 200 pM siRNA treatment. (linear model p<0.001; R²=0.5; FIG. 19).

TABLE 10
ATXN2 protein levels following amiRNA treatment

| Duplex | miR | Mean normalized | Standard |
|---|---|---|---|
| ID/Category | Backbone | ATXN2 Signal | Deviation |
| XD-14790 911 | miR-1-1 | 111.7 | 15.9 |
| XD-14790 911 | miR-155E | 116.8 | 5.4 |
| XD-14800 911 | miR-1-1 | 113.3 | 10.1 |
| XD-14800 911 | miR-155E | 111.1 | 8 |
| XD-14857 911 | miR-1-1 | 112.7 | 11.5 |
| XD-14857 911 | miR-155E | 116.7 | 10.1 1 |
| XD-14742 | miR-1-1 | 54.4 | 1.3 |
| XD-14742 | miR-155E | 89.8 | 10.7 |
| XD-14743 | miR-1-1 | 39.8 | 2 |
| XD-14743 | miR-155E | 89.9 | 8.1 |
| XD-14756 | miR-1-1 | 44.9 | 5.4 |
| XD-14756 | miR-155E | 73.2 | 7.3 |
| XD-14766 | miR-1-1 | 55.4 | 1.2 |
| XD-14766 | miR-155E | 53.3 | 5.1 |
| XD-14781 | miR-1-1 | 79.2 | 10.3 |
| XD-14781 | miR-155E | 100.8 | 14.4 |
| XD-14786 | miR-1-1 | 45 | 1.7 |
| XD-14786 | miR-155E | 77 | 11.4 |
| XD-14787 | miR-1-1 | 83.8 | 6.9 |
| XD-14787 | miR-155E | 103.4 | 12 |
| XD-14788 | miR-1-1 | 69.7 | 9.8 |
| XD-14788 | miR-155E | 98 | 3.8 |
| XD-14790 | miR-1-1 | 43.2 | 7.6 |
| XD-14790 | miR-155E | 56.3 | 7.6 |
| XD-14792 | miR-1-1 | 37.9 | 4.8 |
| XD-14792 | miR-155E | 51.5 | 9.9 |
| XD-14798 | miR-1-1 | 60.8 | 2.6 |
| XD-14798 | miR-155E | 66.8 | 3 |
| XD-14799 | miR-1-1 | 73.5 | 6.7 |
| XD-14799 | miR-155E | 84.9 | 8.9 |
| XD-14800 | miR-1-1 | 41 | 6.4 |
| XD-14800 | miR-155E | 78.1 | 5.7 |
| XD-14819 | miR-1-1 | 46.6 | 7.1 |
| XD-14819 | miR-155E | 63 | 7.5 |
| XD-14835 | miR-1-1 | 41.3 | 7.4 |
| XD-14835 | miR-155E | 67.3 | 21.5 |
| XD-14846 | miR-1-1 | 69.3 | 9.3 |
| XD-14846 | miR-155E | 97.5 | 5.6 |
| XD-14857 | miR-1-1 | 41.2 | 6.3 |
| XD-14857 | miR-155E | 65.3 | 8.9 |
| XD-14887 | miR-1-1 | 71.8 | 11.7 |
| XD-14887 | miR-155E | 87.8 | 16.3 |
| XD-14889 | miR-1-1 | 62.5 | 8.8 |
| XD-14889 | miR-155E | 62.6 | 3.7 |
| XD-14890 | miR-1-1 | 24.8 | 7.2 |
| XD-14890 | miR-155E | 83.8 | 9.2 |
| XD-14901 | miR-1-1 | 61.8 | 8.3 |
| XD-14901 | miR-155E | 84 | 4.7 |
| XD-14904 | miR-1-1 | 44.2 | 8.3 |
| XD-14904 | miR-155E | 55.2 | 9.9 |
| XD-14917 | miR-1-1 | 38.5 | 8.1 |
| XD-14917 | miR-155E | 67.2 | 3.8 |
| XD-14949 | miR-1-1 | 106.8 | 9.7 |
| XD-14949 | miR-155E | 55.2 | 6.7 |

[0326] Table 11 provides the parent guide RNA sequences, amiRNA sequences, and amiRNA DNA sequences as embedded in microRNA backbone-expressing vectors of both active guide sequences as well as a small set of control sequences. The guide sequence anticipated to be produced in cells is described in RNA form, and the sequence encoding the guide sequence (embedded in miRNA) is provided in DNA form.

TABLE 11
amiRNA Sequences

| | | miR | | | |
|---|---|---|---|---|---|
| Parent Guide | ID | Backbone | Category | amiRNA DNA Sequence | amiRNA RNA Sequence |
| AGGAACGUGGGUU | XD-14857 | miR-1-1 | 911 Control | CATGCAGACTGCCTGCTTGGGATG | CAUGCAGACUGCCUGCUUGGGAU |
| GAACUCCUU [SEQ | | | | GAGTTCAAGGGACGTCGCCTTATG | GGAGUUCAAGGGACGUCGCCUUA |
| ID NO: 242] | | | | GACCTGCTAAGCTAAGGAACGTCC | UGGACCUGCUAAGCUAAGGAACG |
| | | | | CTTGAACTCCTTCTCAGGCCGGGA | UCCCUUGAACUCCUUCUCAGGCCG |
| | | | | CCTCTCTCGCCGCACTGAGGGGCA | GGACCUCUCUCGCCGCACUGAGG |
| | | | | CTCCACACCACGGGGGCC | GGCACUCCACACCACGGGGGCC |
| | | | | [SEQ ID NO: 548] | [SEQ ID NO: 1115] |
| AGGAACGUGGGUU | XD-14857 | miR-155E | 911 Control | CTGGAGGCTTGCTTTGGGCTGTAT | CUGGAGGCUUGCUUUGGGCUGUA |
| GAACUCCUU [SEQ | | | | GCTGAGGAACGTCCCTTGAACTCC | UGCUGAGGAACGUCCCUUGAACU |
| ID NO: 242] | | | | TTTTTTGGCCTCTGACTGAAAGGA | CCUUUUUUGGCCUCUGACUGAAA |
| | | | | GTTAAGGACGTTCCTCAGGACAAG | GGAGUUAAGGACGUUCCUCAGGA |
| | | | | GCCCTTTATCAGCACTCACATGGA | CAAGGCCCUUUAUCAGCACUCAC |
| | | | | ACAAATGGCCACCGTG | AUGGAACAAAUGGCCACCGUG |
| | | | | [SEQ ID NO: 549] | [SEQ ID NO: 1116] |
| UUCGGGUUGAAAU | XD-14790 | miR-155E | 911 Control | CTGGAGGCTTGCTTTGGGCTGTAT | CUGGAGGCUUGCUUUGGGCUGUA |
| CUGAAGUGU [SEQ | | | | GCTGTTCGGGTTCTTATCTGAAGTG | UGCUGUUCGGGUUCUUAUCUGAA |
| ID NO: 108] | | | | TTTTTGGCCTCTGACTGAACACTTC | GUGUUUUUGGCCUCUGACUGAAC |
| | | | | AATAGAACCCGAACAGGACAAGG | ACUUCAAUAGAACCCGAACAGGA |
| | | | | CCCTTTATCAGCACTCACATGGAA | CAAGGCCCUUUAUCAGCACUCAC |
| | | | | CAAATGGCCACCGTG | AUGGAACAAAUGGCCACCGUG |
| | | | | [SEQ ID NO: 550] | [SEQ ID NO: 1117] |
| UUCGGGUUGAAAU | XD-14790 | miR-1-1 | 911 Control | CATGCAGACTGCCTGCTTGGGAGA | CAUGCAGACUGCCUGCUUGGGAG |
| CUGAAGUGU [SEQ | | | | CTTCAGATAAGAACCGAGAATATG | ACUUCAGAUAAGAACCGAGAAUA |
| ID NO: 108] | | | | GACCTGCTAAGCTATTCGGGTTCTT | UGGACCUGCUAAGCUAUUCGGGU |
| | | | | ATCTGAAGTGTCTCAGGCCGGGAC | UCUUAUCUGAAGUGUCUCAGGCC |
| | | | | CTCTCTCGCCGCACTGAGGGGCAC | GGGACCUCUCUCGCCGCACUGAG |
| | | | | TCCACACCACGGGGGCC | GGGCACUCCACACCACGGGGGCC |
| | | | | [SEQ ID NO: 551] | [SEQ ID NO: 1118] |
| UUGAUUUCGAGGA | XD-14800 | miR-155E | 911 Control | CTGGAGGCTTGCTTTGGGCTGTAT | CUGGAGGCUUGCUUUGGGCUGUA |
| UGUCGCUGG [SEQ | | | | GCTGTTGATTTCCTCGATGTCGCTG | UGCUGUUGAUUUCCUCGAUGUCG |
| ID NO: 128] | | | | GTTTTGGCCTCTGACTGACCAGCG | CUGGUUUUGGCCUCUGACUGACC |
| | | | | ACTCGGGAAATCAACAGGACAAG | AGCGACUCGGGAAAUCAACAGGA |
| | | | | GCCCTTTATCAGCACTCACATGGA | CAAGGCCCUUUAUCAGCACUCAC |
| | | | | ACAAATGGCCACCGTG | AUGGAACAAAUGGCCACCGUG |
| | | | | [SEQ ID NO: 552] | [SEQ ID NO: 1119] |
| UUGAUUUCGAGGA | XD-14800 | miR-1-1 | 911 Control | CATGCAGACTGCCTGCTTGGGCGA | CAUGCAGACUGCCUGCUUGGGCG |
| UGUCGCUGG [SEQ | | | | GCGACATCGAGGAAACGCAATATG | AGCGACAUCGAGGAAACGCAAUA |
| ID NO: 128] | | | | GACCTGCTAAGCTATTGATTTCCTC | UGGACCUGCUAAGCUAUUGAUUU |
| | | | | GATGTCGCTGGCTCAGGCCGGGAC | CCUCGAUGUCGCUGGCUCAGGCC |
| | | | | CTCTCTCGCCGCACTGAGGGGCAC | GGGACCUCUCUCGCCGCACUGAG |
| | | | | TCCACACCACGGGGGCC | GGGCACUCCACACCACGGGGGCC |
| | | | | [SEQ ID NO: 553] | [SEQ ID NO: 1120] |
| AGAAAUCGUAGAC | XD-14743 | miR-1-1 | Atxn2 | CATGCAGACTGCCTGCTTGGGAGT | CAUGCAGACUGCCUGCUUGGGAG |
| UGAGGCAGU [SEQ | | | targeting | GCCTCAGTCTACGATCGTCTTATGG | UGCCUCAGUCUACGAUCGUCUUA |
| ID NO: 14] | | | | ACCTGCTAAGCTAAGAAATCGTAG | UGGACCUGCUAAGCUAAGAAAUC |
| | | | | ACTGAGGCAGTCTCAGGCCGGGAC | GUAGACUGAGGCAGUCUCAGGCC |
| | | | | CTCTCTCGCCGCACTGAGGGGCAC | GGGACCUCUCUCGCCGCACUGAG |
| | | | | TCCACACCACGGGGGCC | GGGCACUCCACACCACGGGGGCC |
| | | | | [SEQ ID NO: 554] | [SEQ ID NO: 1121] |
| AGAAAUCGUAGAC | XD-14743 | miR-155E | Atxn2 | CTGGAGGCTTGCTTTGGGCTGTAT | CUGGAGGCUUGCUUUGGGCUGUA |
| UGAGGCAGU [SEQ | | | targeting | GCTGAGAAATCGTAGACTGAGGCA | UGCUGAGAAAUCGUAGACUGAGG |
| ID NO: 14] | | | | GTTTTTGGCCTCTGACTGAACTGCC | CAGUUUUUGGCCUCUGACUGAAC |
| | | | | TCGTCACGATTTCTCAGGACAAGG | UGCCUCGUCACGAUUUCUCAGGA |
| | | | | CCCTTTATCAGCACTCACATGGAA | CAAGGCCCUUUAUCAGCACUCAC |
| | | | | CAAATGGCCACCGTG | AUGGAACAAAUGGCCACCGUG |
| | | | | [SEQ ID NO: 555] | [SEQ ID NO: 1122] |
| AGAUACGUCAUUU | XD-14766 | miR-1-1 | Atxn2 | CATGCAGACTGCCTGCTTGGGGCC | CAUGCAGACUGCCUGCUUGGGGC |
| UCCAAAGCC [SEQ | | | targeting | TTTGGAAAATGACGTCCTCTTATG | CUUUGGAAAAUGACGUCCUCUUA |
| ID NO: 60] | | | | GACCTGCTAAGCTAAGATACGTCA | UGGACCUGCUAAGCUAAGAUACG |
| | | | | TTTTCCAAAGCCCTCAGGCCGGGA | UCAUUUUCCAAAGCCCUCAGGCC |
| | | | | CCTCTCTCGCCGCACTGAGGGGCA | GGGACCUCUCUCGCCGCACUGAG |
| | | | | CTCCACACCACGGGGGCC | GGGCACUCCACACCACGGGGGCC |
| | | | | [SEQ ID NO: 556] | [SEQ ID NO: 1123] |
| AGAUACGUCAUUU | XD-14766 | miR-155E | Atxn2 | CTGGAGGCTTGCTTTGGGCTGTAT | CUGGAGGCUUGCUUUGGGCUGUA |
| UCCAAAGCC | | | targeting | GCTGAGATACGTCATTTTCCAAAG | UGCUGAGAUACGUCAUUUUCCAA |
| [SEQ ID NO: 60] | | | | CCTTTTGGCCTCTGACTGAGGCTTT | AGCCUUUUGGCCUCUGACUGAGG |
| | | | | GGAAAGACGTATCTCAGGACAAGG | CUUUGGAAAGACGUAUCUCAGGA |
| | | | | CCCTTTATCAGCACTCACATGGAA | CAAGGCCCUUUAUCAGCACUCAC |
| | | | | CAAATGGCCACCGTG | AUGGAACAAAUGGCCACCGUG |
| | | | | [SEQ ID NO: 557] | [SEQ ID NO: 1124] |
| AGCGUUAGGGUGC | XD-14904 | miR-155E | Atxn2 | CTGGAGGCTTGCTTTGGGCTGTAT | CUGGAGGCUUGCUUUGGGCUGUA |
| GCAUACUGC [SEQ | | | targeting | GCTGAGCGTTAGGGTGCGCATACT | UGCUGAGCGUUAGGGUGCGCAUA |
| ID NO: 336] | | | | GCTTTTGGCCTCTGACTGAGCAGT | CUGCUUUUGGCCUCUGACUGAGC |
| | | | | ATGGCACCTAACGCTCAGGACAAG | AGUAUGGCACCUAACGCUCAGGA |
| | | | | GCCCTTTATCAGCACTCACATGGA | CAAGGCCCUUUAUCAGCACUCAC |
| | | | | ACAAATGGCCACCGTG | AUGGAACAAAUGGCCACCGUG |
| | | | | [SEQ ID NO: 558] | [SEQ ID NO: 1125] |
| AGCGUUAGGGUGC | XD-14904 | miR-1-1 | Atxn2 | CATGCAGACTGCCTGCTTGGGGGA | CAUGCAGACUGCCUGCUUGGGGG |
| GCAUACUGC [SEQ | | | targeting | GTATGCGCACCCTAAGAGCTTATG | AGUAUGCGCACCCUAAGAGCUUA |
| ID NO: 336] | | | | GACCTGCTAAGCTAAGCGTTAGGG | UGGACCUGCUAAGCUAAGCGUUA |
| | | | | TGCGCATACTGCCTCAGGCCGGGA | GGGUGCGCAUACUGCCUCAGGCC |
| | | | | CCTCTCTCGCCGCACTGAGGGGCA | GGGACCUCUCUCGCCGCACUGAG |
| | | | | CTCCACACCACGGGGGCC | GGGCACUCCACACCACGGGGGCC |
| | | | | [SEQ ID NO: 559] | [SEQ ID NO: 1126] |
| AGGAACGUGGGUU | XD-14857 | miR-155E | Atxn2 | CTGGAGGCTTGCTTTGGGCTGTAT | CUGGAGGCUUGCUUUGGGCUGUA |
| GAACUCCUU [SEQ | | | targeting | GCTGAGGAACGTGGGTTGAACTCC | UGCUGAGGAACGUGGGUUGAACU |
| ID NO: 242] | | | | TTTTTTGGCCTCTGACTGAAAGGA | CCUUUUUUGGCCUCUGACUGAAA |
| | | | | GTTAACCACGTTCCTCAGGACAAG | GGAGUUAACCACGUUCCUCAGGA |
| | | | | GCCCTTTATCAGCACTCACATGGA | CAAGGCCCUUUAUCAGCACUCAC |
| | | | | ACAAATGGCCACCGTG | AUGGAACAAAUGGCCACCGUG |
| | | | | [SEQ ID NO: 560] | [SEQ ID NO: 1127] |
| AGGAACGUGGGUU | XD-14857 | miR-1-1 | Atxn2 | CATGCAGACTGCCTGCTTGGGATG | CAUGCAGACUGCCUGCUUGGGAU |
| GAACUCCUU [SEQ | | | targeting | GAGTTCAACCCACGTCGCCTTATG | GGAGUUCAACCCACGUCGCCUUA |
| ID NO: 242] | | | | GACCTGCTAAGCTAAGGAACGTGG | UGGACCUGCUAAGCUAAGGAACG |
| | | | | GTTGAACTCCTTCTCAGGCCGGGA | UGGGUUGAACUCCUUCUCAGGCC |
| | | | | CCTCTCTCGCCGCACTGAGGGGCA | GGGACCUCUCUCGCCGCACUGAG |
| | | | | CTCCACACCACGGGGGCC | GGGCACUCCACACCACGGGGGCC |
| | | | | [SEQ ID NO: 561] | [SEQ ID NO: 1128] |
| AUAAUAAUCCGUC | XD-14949 | miR-155E | Atxn2 | CTGGAGGCTTGCTTTGGGCTGTAT | CUGGAGGCUUGCUUUGGGCUGUA |
| AGUUUGACG [SEQ | | | targeting | GCTGATAATAATCCGTCAGTTTGA | UGCUGAUAAUAAUCCGUCAGUUU |
| ID NO: 426] | | | | CGTTTTGGCCTCTGACTGACGTCAA | GACGUUUUGGCCUCUGACUGACG |
| | | | | ACGACGATTATTATCAGGACAAGG | UCAAACGACGAUUAUUAUCAGGA |
| | | | | CCCTTTATCAGCACTCACATGGAA | CAAGGCCCUUUAUCAGCACUCAC |
| | | | | CAAATGGCCACCGTG | AUGGAACAAAUGGCCACCGUG |
| | | | | [SEQ ID NO: 562] | [SEQ ID NO: 1129] |
| AUAAUAAUCCGUC | XD-14949 | miR-1-1 | Atxn2 | CATGCAGACTGCCTGCTTGGGCCT | CAUGCAGACUGCCUGCUUGGGCC |
| AGUUUGACG [SEQ | | | targeting | CAAACTGACGGATTACGTATTATG | UCAAACUGACGGAUUACGUAUUA |
| ID NO: 426] | | | | GACCTGCTAAGCTAATAATAATCC | UGGACCUGCUAAGCUAAUAAUAA |
| | | | | GTCAGTTTGACGCTCAGGCCGGGA | UCCGUCAGUUUGACGCUCAGGCC |
| | | | | CCTCTCTCGCCGCACTGAGGGGCA | GGGACCUCUCUCGCCGCACUGAG |
| | | | | CTCCACACCACGGGGGCC | GGGCACUCCACACCACGGGGGCC |
| | | | | [SEQ ID NO: 563] | [SEQ ID NO: 1130] |
| AUACGCGGUGAAU | XD-14787 | miR-155E | Atxn2 | CTGGAGGCTTGCTTTGGGCTGTAT | CUGGAGGCUUGCUUUGGGCUGUA |
| UCUGUCUCC [SEQ | | | targeting | GCTGATACGCGGTGAATTCTGTCT | UGCUGAUACGCGGUGAAUUCUGU |
| ID NO: 102] | | | | CCTTTTGGCCTCTGACTGAGGAGA | CUCCUUUUGGCCUCUGACUGAGG |
| | | | | CAGATTACCGCGTATCAGGACAAG | AGACAGAUUACCGCGUAUCAGGA |
| | | | | GCCCTTTATCAGCACTCACATGGA | CAAGGCCCUUUAUCAGCACUCAC |
| | | | | ACAAATGGCCACCGTG | AUGGAACAAAUGGCCACCGUG |
| | | | | [SEQ ID NO: 564] | [SEQ ID NO: 1131] |
| AUACGCGGUGAAU | XD-14787 | miR-1-1 | Atxn2 | CATGCAGACTGCCTGCTTGGGGCA | CAUGCAGACUGCCUGCUUGGGGC |
| UCUGUCUCC [SEQ | | | targeting | GACAGAATTCACCGCCTTATTATG | AGACAGAAUUCACCGCCUUAUUA |
| ID NO: 102] | | | | GACCTGCTAAGCTAATACGCGGTG | UGGACCUGCUAAGCUAAUACGCG |
| | | | | AATTCTGTCTCCCTCAGGCCGGGA | GUGAAUUCUGUCUCCCUCAGGCC |
| | | | | CCTCTCTCGCCGCACTGAGGGGCA | GGGACCUCUCUCGCCGCACUGAG |
| | | | | CTCCACACCACGGGGGCC | GGGCACUCCACACCACGGGGGCC |
| | | | | [SEQ ID NO: 565] | [SEQ ID NO: 1132] |
| AUUAACUACUCUU | XD-14792 | miR-1-1 | Atxn2 | CATGCAGACTGCCTGCTTGGGTAC | CAUGCAGACUGCCUGCUUGGGUA |
| UGGUCUGAA [SEQ | | | targeting | AGACCAAAGAGTAGTCGAATTATG | CAGACCAAAGAGUAGUCGAAUUA |
| ID NO: 112] | | | | GACCTGCTAAGCTAATTAACTACT | UGGACCUGCUAAGCUAAUUAACU |
| | | | | CTTTGGTCTGAACTCAGGCCGGGA | ACUCUUUGGUCUGAACUCAGGCC |
| | | | | CCTCTCTCGCCGCACTGAGGGGCA | GGGACCUCUCUCGCCGCACUGAG |
| | | | | CTCCACACCACGGGGGCC | GGGCACUCCACACCACGGGGGCC |
| | | | | [SEQ ID NO: 538] | [SEQ ID NO: 1133] |
| AUUAACUACUCUU | XD-14792 | miR-155E | Atxn2 | CTGGAGGCTTGCTTTGGGCTGTAT | CUGGAGGCUUGCUUUGGGCUGUA |
| UGGUCUGAA [SEQ | | | targeting | GCTGATTAACTACTCTTTGGTCTGA | UGCUGAUUAACUACUCUUUGGUC |
| ID NO: 112] | | | | ATTTTGGCCTCTGACTGATTCAGAC | UGAAUUUUGGCCUCUGACUGAUU |
| | | | | CAAGGTAGTTAATCAGGACAAGGC | CAGACCAAGGUAGUUAAUCAGGA |
| | | | | CCTTTATCAGCACTCACATGGAAC | CAAGGCCCUUUAUCAGCACUCAC |
| | | | | AAATGGCCACCGTG | AUGGAACAAAUGGCCACCGUG |
| | | | | [SEQ ID NO: 566] | [SEQ ID NO: 1134] |
| AUUGCGUGGAGUA | XD-14889 | miR-155E | Atxn2 | CTGGAGGCTTGCTTTGGGCTGTAT | CUGGAGGCUUGCUUUGGGCUGUA |
| AGCUGGUGG [SEQ | | | targeting | GCTGATTGCGTGGAGTAAGCTGGT | UGCUGAUUGCGUGGAGUAAGCUG |
| ID NO: 306] | | | | GGTTTTGGCCTCTGACTGACCACC | GUGGUUUUGGCCUCUGACUGACC |
| | | | | AGCTACCCACGCAATCAGGACAAG | ACCAGCUACCCACGCAAUCAGGAC |
| | | | | GCCCTTTATCAGCACTCACATGGA | AAGGCCCUUUAUCAGCACUCACA |
| | | | | ACAAATGGCCACCGTG | UGGAACAAAUGGCCACCGUG |
| | | | | [SEQ ID NO: 567] | [SEQ ID NO: 1135] |
| AUUGCGUGGAGUA | XD-14889 | miR-1-1 | Atxn2 | CATGCAGACTGCCTGCTTGGGCGA | CAUGCAGACUGCCUGCUUGGGCG |
| AGCUGGUGG [SEQ | | | targeting | CCAGCTTACTCCACGGAAATTATG | ACCAGCUUACUCCACGGAAAUUA |
| ID NO: 306] | | | | GACCTGCTAAGCTAATTGCGTGGA | UGGACCUGCUAAGCUAAUUGCGU |
| | | | | GTAAGCTGGTGGCTCAGGCCGGGA | GGAGUAAGCUGGUGGCUCAGGCC |
| | | | | CCTCTCTCGCCGCACTGAGGGGCA | GGGACCUCUCUCGCCGCACUGAG |
| | | | | CTCCACACCACGGGGGCC | GGGCACUCCACACCACGGGGGCC |
| | | | | [SEQ ID NO: 568] | [SEQ ID NO: 1136] |
| AUUUCGAGGAUGU | XD-14798 | miR-155E | Atxn2 | CTGGAGGCTTGCTTTGGGCTGTAT | CUGGAGGCUUGCUUUGGGCUGUA |
| CGCUGGGCC [SEQ | | | targeting | GCTGATTTCGAGGATGTCGCTGGG | UGCUGAUUUCGAGGAUGUCGCUG |
| ID NO: 124] | | | | CCTTTTGGCCTCTGACTGAGGCCCA | GGCCUUUUGGCCUCUGACUGAGG |
| | | | | GCACACCTCGAAATCAGGACAAGG | CCCAGCACACCUCGAAAUCAGGAC |
| | | | | CCCTTTATCAGCACTCACATGGAA | AAGGCCCUUUAUCAGCACUCACA |
| | | | | CAAATGGCCACCGTG | UGGAACAAAUGGCCACCGUG |
| | | | | [SEQ ID NO: 569] | [SEQ ID NO: 1137] |
| AUUUCGAGGAUGU | XD-14798 | miR-1-1 | Atxn2 | CATGCAGACTGCCTGCTTGGGGCC | CAUGCAGACUGCCUGCUUGGGGC |
| CGCUGGGCC [SEQ | | | targeting | CCAGCGACATCCTCGCCAATTATG | CCCAGCGACAUCCUCGCCAAUUAU |
| ID NO: 124] | | | | GACCTGCTAAGCTAATTTCGAGGA | GGACCUGCUAAGCUAAUUUCGAG |
| | | | | TGTCGCTGGGCCCTCAGGCCGGGA | GAUGUCGCUGGGCCCUCAGGCCG |
| | | | | CCTCTCTCGCCGCACTGAGGGGCA | GGACCUCUCUCGCCGCACUGAGG |
| | | | | CTCCACACCACGGGGGCC | GGCACUCCACACCACGGGGGCC |
| | | | | [SEQ ID NO: 570] | [SEQ ID NO: 1138] |
| UAAAUCGUAGACU | XD-14742 | miR-1-1 | Atxn2 | CATGCAGACTGCCTGCTTGGGGTC | UAGACUGAGGCAGUCCUCAGGCC |
| GAGGCAGUC [SEQ | | | targeting | TGCCTCAGTCTACGACGTTATATG | CAUGCAGACUGCCUGCUUGGGGU |
| ID NO: 12] | | | | GACCTGCTAAGCTATAAATCGTAG | CUGCCUCAGUCUACGACGUUAUA |
| | | | | ACTGAGGCAGTCCTCAGGCCGGGA | UGGACCUGCUAAGCUAUAAAUCG |
| | | | | CCTCTCTCGCCGCACTGAGGGGCA | GGGACCUCUCUCGCCGCACUGAG |
| | | | | CTCCACACCACGGGGGCC | GGGCACUCCACACCACGGGGGCC |
| | | | | [SEQ ID NO: 571] | [SEQ ID NO: 1139] |
| UAAAUCGUAGACU | XD-14742 | miR-155E | Atxn2 | CTGGAGGCTTGCTTTGGGCTGTAT | CUGGAGGCUUGCUUUGGGCUGUA |
| GAGGCAGUC [SEQ | | | targeting | GCTGTAAATCGTAGACTGAGGCAG | UGCUGUAAAUCGUAGACUGAGGC |
| ID NO: 12] | | | | TCTTTTGGCCTCTGACTGAGACTGC | AGUCUUUUGGCCUCUGACUGAGA |
| | | | | CTAGTTACGATTTACAGGACAAGG | CUGCCUAGUUACGAUUUACAGGA |
| | | | | CCCTTTATCAGCACTCACATGGAA | CAAGGCCCUUUAUCAGCACUCAC |
| | | | | CAAATGGCCACCGTG | AUGGAACAAAUGGCCACCGUG |
| | | | | [SEQ ID NO: 572] | [SEQ ID NO: 1140] |
| UACGCGGUGAAUU | XD-14786 | miR-1-1 | Atxn2 | CATGCAGACTGCCTGCTTGGGGCG | CAUGCAGACUGCCUGCUUGGGGC |
| CUGUCUCCC [SEQ | | | targeting | AGACAGAATTCACCGGAGTATATG | GAGACAGAAUUCACCGGAGUAUA |
| ID NO: 100] | | | | GACCTGCTAAGCTATACGCGGTGA | UGGACCUGCUAAGCUAUACGCGG |
| | | | | ATTCTGTCTCCCCTCAGGCCGGGA | UGAAUUCUGUCUCCCCUCAGGCC |
| | | | | CCTCTCTCGCCGCACTGAGGGGCA | GGGACCUCUCUCGCCGCACUGAG |
| | | | | CTCCACACCACGGGGGCC | GGGCACUCCACACCACGGGGGCC |
| | | | | [SEQ ID NO: 573] | [SEQ ID NO: 1141] |
| UACGCGGUGAAUU | XD-14786 | miR-155E | Atxn2 | CTGGAGGCTTGCTTTGGGCTGTAT | CUGGAGGCUUGCUUUGGGCUGUA |
| CUGUCUCCC [SEQ | | | targeting | GCTGTACGCGGTGAATTCTGTCTCC | UGCUGUACGCGGUGAAUUCUGUC |
| ID NO: 100] | | | | CTTTTGGCCTCTGACTGAGGGAGA | UCCCUUUUGGCCUCUGACUGAGG |
| | | | | CAAATCACCGCGTACAGGACAAGG | GAGACAAAUCACCGCGUACAGGA |
| | | | | CCCTTTATCAGCACTCACATGGAA | CAAGGCCCUUUAUCAGCACUCAC |
| | | | | CAAATGGCCACCGTG | AUGGAACAAAUGGCCACCGUG |
| | | | | [SEQ ID NO: 574] | [SEQ ID NO: 1142] |
| UAUACGCGGUGAA | XD-14788 | miR-1-1 | Atxn2 | CATGCAGACTGCCTGCTTGGGGTG | CAUGCAGACUGCCUGCUUGGGGU |
| UUCUGUCUC [SEQ | | | targeting | ACAGAATTCACCGCGCGATATATG | GACAGAAUUCACCGCGCGAUAUA |
| ID NO: 104] | | | | GACCTGCTAAGCTATATACGCGGT | UGGACCUGCUAAGCUAUAUACGC |
| | | | | GAATTCTGTCTCCTCAGGCCGGGA | GGUGAAUUCUGUCUCCUCAGGCC |
| | | | | CCTCTCTCGCCGCACTGAGGGGCA | GGGACCUCUCUCGCCGCACUGAG |
| | | | | CTCCACACCACGGGGGCC | GGGCACUCCACACCACGGGGGCC |
| | | | | [SEQ ID NO: 575] | [SEQ ID NO: 1143] |
| UAUACGCGGUGAA | XD-14788 | miR-155E | Atxn2 | CTGGAGGCTTGCTTTGGGCTGTAT | CUGGAGGCUUGCUUUGGGCUGUA |
| UUCUGUCUC [SEQ | | | targeting | GCTGTATACGCGGTGAATTCTGTCT | UGCUGUAUACGCGGUGAAUUCUG |
| ID NO: 104] | | | | CTTTTGGCCTCTGACTGAGAGACA | UCUCUUUUGGCCUCUGACUGAGA |
| | | | | GATTCCCGCGTATACAGGACAAGG | GACAGAUUCCCGCGUAUACAGGA |
| | | | | CCCTTTATCAGCACTCACATGGAA | CAAGGCCCUUUAUCAGCACUCAC |
| | | | | CAAATGGCCACCGTG | AUGGAACAAAUGGCCACCGUG |
| | | | | [SEQ ID NO: 576] | [SEQ ID NO: 1144] |
| UAUUGCGUGGAGU | XD-14890 | miR-1-1 | Atxn2 | CATGCAGACTGCCTGCTTGGGCTC | CAUGCAGACUGCCUGCUUGGGCU |
| AAGCUGGUG [SEQ | | | targeting | CAGCTTACTCCACGCCCATATATG | CCAGCUUACUCCACGCCCAUAUAU |
| ID NO: 308] | | | | GACCTGCTAAGCTATATTGCGTGG | GGACCUGCUAAGCUAUAUUGCGU |
| | | | | AGTAAGCTGGTGCTCAGGCCGGGA | GGAGUAAGCUGGUGCUCAGGCCG |
| | | | | CCTCTCTCGCCGCACTGAGGGGCA | GGACCUCUCUCGCCGCACUGAGG |
| | | | | CTCCACACCACGGGGGCC | GGCACUCCACACCACGGGGGCC |
| | | | | [SEQ ID NO: 577] | [SEQ ID NO: 1145] |
| UAUUGCGUGGAGU | XD-14890 | miR-155E | Atxn2 | CTGGAGGCTTGCTTTGGGCTGTAT | CUGGAGGCUUGCUUUGGGCUGUA |
| AAGCUGGUG [SEQ | | | targeting | GCTGTATTGCGTGGAGTAAGCTGG | UGCUGUAUUGCGUGGAGUAAGCU |
| ID NO: 308] | | | | TGTTTTGGCCTCTGACTGACACCAG | GGUGUUUUGGCCUCUGACUGACA |
| | | | | CTACTCACGCAATACAGGACAAGG | CCAGCUACUCACGCAAUACAGGA |
| | | | | CCCTTTATCAGCACTCACATGGAA | CAAGGCCCUUUAUCAGCACUCAC |
| | | | | CAAATGGCCACCGTG | AUGGAACAAAUGGCCACCGUG |
| | | | | [SEQ ID NO: 578] | [SEQ ID NO: 1146] |
| UAUUUCGAGGAUG | XD-14799 | miR-155E | Atxn2 | CTGGAGGCTTGCTTTGGGCTGTAT | CUGGAGGCUUGCUUUGGGCUGUA |
| UCGCUGGGC [SEQ | | | targeting | GCTGTATTTCGAGGATGTCGCTGG | UGCUGUAUUUCGAGGAUGUCGCU |
| ID NO: 126] | | | | GCTTTTGGCCTCTGACTGAGCCCA | GGGCUUUUGGCCUCUGACUGAGC |
| | | | | GCGCATCTCGAAATACAGGACAAG | CCAGCGCAUCUCGAAAUACAGGA |
| | | | | GCCCTTTATCAGCACTCACATGGA | CAAGGCCCUUUAUCAGCACUCAC |
| | | | | ACAAATGGCCACCGTG | AUGGAACAAAUGGCCACCGUG |
| | | | | [SEQ ID NO: 579] | [SEQ ID NO: 1147] |
| UAUUUCGAGGAUG | XD-14799 | miR-1-1 | Atxn2 | CATGCAGACTGCCTGCTTGGGGGC | CAUGCAGACUGCCUGCUUGGGGG |
| UCGCUGGGC [SEQ | | | targeting | CAGCGACATCCTCGACCATATATG | CCAGCGACAUCCUCGACCAUAUA |
| ID NO: 126] | | | | GACCTGCTAAGCTATATTTCGAGG | UGGACCUGCUAAGCUAUAUUUCG |
| | | | | ATGTCGCTGGGCCTCAGGCCGGGA | AGGAUGUCGCUGGGCCUCAGGCC |
| | | | | CCTCTCTCGCCGCACTGAGGGGCA | GGGACCUCUCUCGCCGCACUGAG |
| | | | | CTCCACACCACGGGGGCC | GGGCACUCCACACCACGGGGGCC |
| | | | | [SEQ ID NO: 580] | [SEQ ID NO: 1148] |
| UCGCUGUUGGGGC | XD-14887 | miR-1-1 | Atxn2 | CATGCAGACTGCCTGCTTGGGAGC | CAUGCAGACUGCCUGCUUGGGAG |
| AUAUUUGGU [SEQ | | | targeting | AAATATGCCCCAACACTCGATATG | CAAAUAUGCCCCAACACUCGAUA |
| ID NO: 302] | | | | GACCTGCTAAGCTATCGCTGTTGG | UGGACCUGCUAAGCUAUCGCUGU |
| | | | | GGCATATTTGGTCTCAGGCCGGGA | UGGGGCAUAUUUGGUCUCAGGCC |
| | | | | CCTCTCTCGCCGCACTGAGGGGCA | GGGACCUCUCUCGCCGCACUGAG |
| | | | | CTCCACACCACGGGGGCC | GGGCACUCCACACCACGGGGGCC |
| | | | | [SEQ ID NO: 581] | [SEQ ID NO: 1149] |
| UCGCUGUUGGGGC | XD-14887 | miR-155E | Atxn2 | CTGGAGGCTTGCTTTGGGCTGTAT | CUGGAGGCUUGCUUUGGGCUGUA |
| AUAUUUGGU [SEQ | | | targeting | GCTGTCGCTGTTGGGGCATATTTG | UGCUGUCGCUGUUGGGGCAUAUU |
| ID NO: 302] | | | | GTTTTTGGCCTCTGACTGAACCAA | UGGUUUUUGGCCUCUGACUGAAC |
| | | | | ATAGCCCAACAGCGACAGGACAA | CAAAUAGCCCAACAGCGACAGGA |
| | | | | GGCCCTTTATCAGCACTCACATGG | CAAGGCCCUUUAUCAGCACUCAC |
| | | | | AACAAATGGCCACCGTG | AUGGAACAAAUGGCCACCGUG |
| | | | | [SEQ ID NO: 582] | [SEQ ID NO: 1150] |
| UGCGCAUACUGCUG | XD-14901 | miR-1-1 | Atxn2 | CATGCAGACTGCCTGCTTGGGCGC | CAUGCAGACUGCCUGCUUGGGCG |
| AGCAAGGG [SEQ ID | | | targeting | TTGCTCAGCAGTATGGAGCATATG | CUUGCUCAGCAGUAUGGAGCAUA |
| NO: 330] | | | | GACCTGCTAAGCTATGCGCATACT | UGGACCUGCUAAGCUAUGCGCAU |
| | | | | GCTGAGCAAGGGCTCAGGCCGGGA | ACUGCUGAGCAAGGGCUCAGGCC |
| | | | | CCTCTCTCGCCGCACTGAGGGGCA | GGGACCUCUCUCGCCGCACUGAG |
| | | | | CTCCACACCACGGGGGCC | GGGCACUCCACACCACGGGGGCC |
| | | | | [SEQ ID NO: 583] | [SEQ ID NO: 1151] |
| UGCGCAUACUGCUG | XD-14901 | miR-155E | Atxn2 | CTGGAGGCTTGCTTTGGGCTGTAT | CUGGAGGCUUGCUUUGGGCUGUA |
| AGCAAGGG [SEQ ID | | | targeting | GCTGTGCGCATACTGCTGAGCAAG | UGCUGUGCGCAUACUGCUGAGCA |
| NO: 330] | | | | GGTTTTGGCCTCTGACTGACCCTTG | AGGGUUUUGGCCUCUGACUGACC |
| | | | | CTAGCGTATGCGCACAGGACAAGG | CUUGCUAGCGUAUGCGCACAGGA |
| | | | | CCCTTTATCAGCACTCACATGGAA | CAAGGCCCUUUAUCAGCACUCAC |
| | | | | CAAATGGCCACCGTG | AUGGAACAAAUGGCCACCGUG |
| | | | | [SEQ ID NO: 584] | [SEQ ID NO: 1152] |
| UGUACCACAACAAA | XD-14756 | miR-1-1 | Atxn2 | CATGCAGACTGCCTGCTTGGGGAT | CAUGCAGACUGCCUGCUUGGGGA |
| GUCUGAAC [SEQ ID | | | targeting | CAGACTTTGTTGTGGCGACATATG | UCAGACUUUGUUGUGGCGACAUA |
| NO: 40] | | | | GACCTGCTAAGCTATGTACCACAA | UGGACCUGCUAAGCUAUGUACCA |
| | | | | CAAAGTCTGAACCTCAGGCCGGGA | CAACAAAGUCUGAACCUCAGGCC |
| | | | | CCTCTCTCGCCGCACTGAGGGGCA | GGGACCUCUCUCGCCGCACUGAG |
| | | | | CTCCACACCACGGGGGCC | GGGCACUCCACACCACGGGGGCC |
| | | | | [SEQ ID NO: 585] | [SEQ ID NO: 1153] |
| UGUACCACAACAAA | XD-14756 | miR-155E | Atxn2 | CTGGAGGCTTGCTTTGGGCTGTAT | CUGGAGGCUUGCUUUGGGCUGUA |
| GUCUGAAC [SEQ ID | | | targeting | GCTGTGTACCACAACAAAGTCTGA | UGCUGUGUACCACAACAAAGUCU |
| NO: 40] | | | | ACTTTTGGCCTCTGACTGAGTTCAG | GAACUUUUGGCCUCUGACUGAGU |
| | | | | ACTTGTGTGGTACACAGGACAAGG | UCAGACUUGUGUGGUACACAGGA |
| | | | | CCCTTTATCAGCACTCACATGGAA | CAAGGCCCUUUAUCAGCACUCAC |
| | | | | CAAATGGCCACCGTG | AUGGAACAAAUGGCCACCGUG |
| | | | | [SEQ ID NO: 586] | [SEQ ID NO: 1154] |
| UGUAUACGCCGGCU | XD-14917 | miR-1-1 | Atxn2 | CATGCAGACTGCCTGCTTGGGTGA | CAUGCAGACUGCCUGCUUGGGUG |
| GAACGUGA [SEQ ID | | | targeting | CGTTCAGCCGGCGTACGACATATG | ACGUUCAGCCGGCGUACGACAUA |
| NO: 362] | | | | GACCTGCTAAGCTATGTATACGCC | UGGACCUGCUAAGCUAUGUAUAC |
| | | | | GGCTGAACGTGACTCAGGCCGGGA | GCCGGCUGAACGUGACUCAGGCC |
| | | | | CCTCTCTCGCCGCACTGAGGGGCA | GGGACCUCUCUCGCCGCACUGAG |
| | | | | CTCCACACCACGGGGGCC | GGGCACUCCACACCACGGGGGCC |
| | | | | [SEQ ID NO: 587] | [SEQ ID NO: 1155] |
| UGUAUACGCCGGCU | XD-14917 | miR-155E | Atxn2 | CTGGAGGCTTGCTTTGGGCTGTAT | CUGGAGGCUUGCUUUGGGCUGUA |
| GAACGUGA [SEQ ID | | | targeting | GCTGTGTATACGCCGGCTGAACGT | UGCUGUGUAUACGCCGGCUGAAC |
| NO: 362] | | | | GATTTTGGCCTCTGACTGATCACGT | GUGAUUUUGGCCUCUGACUGAUC |
| | | | | TCGCCGCGTATACACAGGACAAGG | ACGUUCGCCGCGUAUACACAGGA |
| | | | | CCCTTTATCAGCACTCACATGGAA | CAAGGCCCUUUAUCAGCACUCAC |
| | | | | CAAATGGCCACCGTG | AUGGAACAAAUGGCCACCGUG |
| | | | | [SEQ ID NO: 588] | [SEQ ID NO: 1156] |
| UUACUAAGUAUUG | XD-14846 | miR-155E | Atxn2 | CTGGAGGCTTGCTTTGGGCTGTAT | CUGGAGGCUUGCUUUGGGCUGUA |
| AAGGGGAAA [SEQ | | | targeting | GCTGTTACTAAGTATTGAAGGGGA | UGCUGUUACUAAGUAUUGAAGGG |
| ID NO: 220] | | | | AATTTTGGCCTCTGACTGATTTCCC | GAAAUUUUGGCCUCUGACUGAUU |
| | | | | CTCAAACTTAGTAACAGGACAAGG | UCCCCUCAAACUUAGUAACAGGA |
| | | | | CCCTTTATCAGCACTCACATGGAA | CAAGGCCCUUUAUCAGCACUCAC |
| | | | | CAAATGGCCACCGTG | AUGGAACAAAUGGCCACCGUG |
| | | | | [SEQ ID NO: 589] | [SEQ ID NO: 1157] |
| UUACUAAGUAUUG | XD-14846 | miR-1-1 | Atxn2 | CATGCAGACTGCCTGCTTGGGTAT | CAUGCAGACUGCCUGCUUGGGUA |
| AAGGGGAAA [SEQ | | | targeting | CCCCTTCAATACTTACTTAATATGG | UCCCCUUCAAUACUUACUUAAUA |
| ID NO: 220] | | | | ACCTGCTAAGCTATTACTAAGTATT | UGGACCUGCUAAGCUAUUACUAA |
| | | | | GAAGGGGAAACTCAGGCCGGGAC | GUAUUGAAGGGGAAACUCAGGCC |
| | | | | CTCTCTCGCCGCACTGAGGGGCAC | GGGACCUCUCUCGCCGCACUGAG |
| | | | | TCCACACCACGGGGGCC | GGGCACUCCACACCACGGGGGCC |
| | | | | [SEQ ID NO: 590] | [SEQ ID NO: 1158] |
| UUAGUUGAUCCAU | XD-14835 | miR-1-1 | Atxn2 | CATGCAGACTGCCTGCTTGGGTGT | CAUGCAGACUGCCUGCUUGGGUG |
| AGAUUCAGA [SEQ | | | targeting | GAATCTATGGATCAAGATAATATG | UGAAUCUAUGGAUCAAGAUAAUA |
| ID NO: 198] | | | | GACCTGCTAAGCTATTAGTTGATC | UGGACCUGCUAAGCUAUUAGUUG |
| | | | | CATAGATTCAGACTCAGGCCGGGA | AUCCAUAGAUUCAGACUCAGGCC |
| | | | | CCTCTCTCGCCGCACTGAGGGGCA | GGGACCUCUCUCGCCGCACUGAG |
| | | | | CTCCACACCACGGGGGCC | GGGCACUCCACACCACGGGGGCC |
| | | | | [SEQ ID NO: 591] | [SEQ ID NO: 1159] |
| UUAGUUGAUCCAU | XD-14835 | miR-155E | Atxn2 | CTGGAGGCTTGCTTTGGGCTGTAT | CUGGAGGCUUGCUUUGGGCUGUA |
| AGAUUCAGA [SEQ | | | targeting | GCTGTTAGTTGATCCATAGATTCA | UGCUGUUAGUUGAUCCAUAGAUU |
| ID NO: 198] | | | | GATTTTGGCCTCTGACTGATCTGAA | CAGAUUUUGGCCUCUGACUGAUC |
| | | | | TCATGATCAACTAACAGGACAAGG | UGAAUCAUGAUCAACUAACAGGA |
| | | | | CCCTTTATCAGCACTCACATGGAA | CAAGGCCCUUUAUCAGCACUCAC |
| | | | | CAAATGGCCACCGTG | AUGGAACAAAUGGCCACCGUG |
| | | | | [SEQ ID NO: 592] | [SEQ ID NO: 1160] |
| UUCGAUGCAGGAC | XD-14819 | miR-155E | Atxn2 | CTGGAGGCTTGCTTTGGGCTGTAT | CUGGAGGCUUGCUUUGGGCUGUA |
| UAGCAGGCG [SEQ | | | targeting | GCTGTTCGATGCAGGACTAGCAGG | UGCUGUUCGAUGCAGGACUAGCA |
| ID NO: 166] | | | | CGTTTTGGCCTCTGACTGACGCCTG | GGCGUUUUGGCCUCUGACUGACG |
| | | | | CTGTCTGCATCGAACAGGACAAGG | CCUGCUGUCUGCAUCGAACAGGA |
| | | | | CCCTTTATCAGCACTCACATGGAA | CAAGGCCCUUUAUCAGCACUCAC |
| | | | | CAAATGGCCACCGTG | AUGGAACAAAUGGCCACCGUG |
| | | | | [SEQ ID NO: 593] | [SEQ ID NO: 1161] |
| UUCGAUGCAGGAC | XD-14819 | miR-1-1 | Atxn2 | CATGCAGACTGCCTGCTTGGGCCC | CAUGCAGACUGCCUGCUUGGGCC |
| UAGCAGGCG [SEQ | | | targeting | CTGCTAGTCCTGCATGAGAATATG | CCUGCUAGUCCUGCAUGAGAAUA |
| ID NO: 166] | | | | GACCTGCTAAGCTATTCGATGCAG | UGGACCUGCUAAGCUAUUCGAUG |
| | | | | GACTAGCAGGCGCTCAGGCCGGGA | CAGGACUAGCAGGCGCUCAGGCC |
| | | | | CCTCTCTCGCCGCACTGAGGGGCA | GGGACCUCUCUCGCCGCACUGAG |
| | | | | CTCCACACCACGGGGGCC | GGGCACUCCACACCACGGGGGCC |
| | | | | [SEQ ID NO: 594] | [SEQ ID NO: 1162] |
| UUCGGGUUGAAAU | XD-14790 | miR-155E | Atxn2 | CTGGAGGCTTGCTTTGGGCTGTAT | CUGGAGGCUUGCUUUGGGCUGUA |
| CUGAAGUGU [SEQ | | | targeting | GCTGTTCGGGTTGAAATCTGAAGT | UGCUGUUCGGGUUGAAAUCUGAA |
| ID NO: 108] | | | | GTTTTTGGCCTCTGACTGAACACTT | GUGUUUUUGGCCUCUGACUGAAC |
| | | | | CAATTCAACCCGAACAGGACAAGG | ACUUCAAUUCAACCCGAACAGGA |
| | | | | CCCTTTATCAGCACTCACATGGAA | CAAGGCCCUUUAUCAGCACUCAC |
| | | | | CAAATGGCCACCGTG | AUGGAACAAAUGGCCACCGUG |
| | | | | [SEQ ID NO: 595] | [SEQ ID NO: 1163] |
| UUCGGGUUGAAAU | XD-14790 | miR-1-1 | Atxn2 | CATGCAGACTGCCTGCTTGGGAGA | CAUGCAGACUGCCUGCUUGGGAG |
| CUGAAGUGU [SEQ | | | targeting | CTTCAGATTTCAACCGAGAATATG | ACUUCAGAUUUCAACCGAGAAUA |
| ID NO: 108] | | | | GACCTGCTAAGCTATTCGGGTTGA | UGGACCUGCUAAGCUAUUCGGGU |
| | | | | AATCTGAAGTGTCTCAGGCCGGGA | UGAAAUCUGAAGUGUCUCAGGCC |
| | | | | CCTCTCTCGCCGCACTGAGGGGCA | GGGACCUCUCUCGCCGCACUGAG |
| | | | | CTCCACACCACGGGGGCC | GGGCACUCCACACCACGGGGGCC |
| | | | | [SEQ ID NO: 596] | [SEQ ID NO: 1164] |
| UUGAUUUCGAGGA | XD-14800 | miR-1-1 | Atxn2 | CATGCAGACTGCCTGCTTGGGCGA | CAUGCAGACUGCCUGCUUGGGCG |
| UGUCGCUGG [SEQ | | | targeting | GCGACATCCTCGAAACGCAATATG | AGCGACAUCCUCGAAACGCAAUA |
| ID NO: 128] | | | | GACCTGCTAAGCTATTGATTTCGA | UGGACCUGCUAAGCUAUUGAUUU |
| | | | | GGATGTCGCTGGCTCAGGCCGGGA | CGAGGAUGUCGCUGGCUCAGGCC |
| | | | | CCTCTCTCGCCGCACTGAGGGGCA | GGGACCUCUCUCGCCGCACUGAG |
| | | | | CTCCACACCACGGGGGCC | GGGCACUCCACACCACGGGGGCC |
| | | | | [SEQ ID NO: 597] | [SEQ ID NO: 1165] |
| UUGAUUUCGAGGA | XD-14800 | miR-155E | Atxn2 | CTGGAGGCTTGCTTTGGGCTGTAT | CUGGAGGCUUGCUUUGGGCUGUA |
| UGUCGCUGG [SEQ | | | targeting | GCTGTTGATTTCGAGGATGTCGCT | UGCUGUUGAUUUCGAGGAUGUCG |
| ID NO: 128] | | | | GGTTTTGGCCTCTGACTGACCAGC | CUGGUUUUGGCCUCUGACUGACC |
| | | | | GACTCCCGAAATCAACAGGACAAG | AGCGACUCCCGAAAUCAACAGGA |
| | | | | GCCCTTTATCAGCACTCACATGGA | CAAGGCCCUUUAUCAGCACUCAC |
| | | | | ACAAATGGCCACCGTG | AUGGAACAAAUGGCCACCGUG |
| | | | | [SEQ ID NO: 598] | [SEQ ID NO: 1166] |
| UUGUACUGGGCAC | XD-14781 | miR-155E | Atxn2 | CTGGAGGCTTGCTTTGGGCTGTAT | CUGGAGGCUUGCUUUGGGCUGUA |
| UUGACUCAA [SEQ | | | targeting | GCTGTTGTACTGGGCACTTGACTC | UGCUGUUGUACUGGGCACUUGAC |
| ID NO: 90] | | | | AATTTTGGCCTCTGACTGATTGAGT | UCAAUUUUGGCCUCUGACUGAUU |
| | | | | CAGTGCCAGTACAACAGGACAAGG | GAGUCAGUGCCAGUACAACAGGA |
| | | | | CCCTTTATCAGCACTCACATGGAA | CAAGGCCCUUUAUCAGCACUCAC |
| | | | | CAAATGGCCACCGTG | AUGGAACAAAUGGCCACCGUG |
| | | | | [SEQ ID NO: 599] | [SEQ ID NO: 1167] |
| UUGUACUGGGCAC | XD-14781 | miR-1-1 | Atxn2 | CATGCAGACTGCCTGCTTGGGTAG | CAUGCAGACUGCCUGCUUGGGUA |
| UUGACUCAA [SEQ | | | targeting | AGTCAAGTGCCCAGTCCCAATATG | GAGUCAAGUGCCCAGUCCCAAUA |
| ID NO: 90] | | | | GACCTGCTAAGCTATTGTACTGGG | UGGACCUGCUAAGCUAUUGUACU |
| | | | | CACTTGACTCAACTCAGGCCGGGA | GGGCACUUGACUCAACUCAGGCC |
| | | | | CCTCTCTCGCCGCACTGAGGGGCA | GGGACCUCUCUCGCCGCACUGAG |
| | | | | CTCCACACCACGGGGGCC | GGGCACUCCACACCACGGGGGCC |
| | | | | [SEQ ID NO: 600] | [SEQ ID NO: 1168] |

[0327] ATXN2-targeting miRNA guide sequences having at least 25% ATXN2 immunofluorescence signal knockdown are shown in Table 12 (both RNA and DNA versions). ATXN2-targeting miRNA guide sequences having at least 50% ATXN2 immunofluorescence signal knockdown are shown in Table 13 (both RNA and DNA versions).

TABLE 12
miRNA guide sequences with at least 25% knockdown of ATXN2

| siRNA | Guide (antisense sequence) | Guide (antisense sequence) |
|---|---|---|
| duplex ID | (RNA) | (DNA) |
| XD-14742 | UAAAUCGUAGACUGAGGCA | TAAATCGTAGACTGAGGCA |
| | GUC | GTC |
| | [SEQ ID NO: 12] | [SEQ ID NO: 601] |
| XD-14743 | AGAAAUCGUAGACUGAGGC | AGAAATCGTAGACTGAGGC |
| | AGU | AGT |
| | [SEQ ID NO: 14] | [SEQ ID NO: 602] |
| XD-14756 | UGUACCACAACAAAGUCUG | TGTACCACAACAAAGTCTGA |
| | AAC | AC |
| | [SEQ ID NO: 40] | [SEQ ID NO: 603] |
| XD-14766 | AGAUACGUCAUUUUCCAAA | AGATACGTCATTTTCCAAAG |
| | GCC | CC |
| | [SEQ ID NO: 601 | SEQ ID NO: 604] |
| XD-14786 | UACGCGGUGAAUUCUGUCU | TACGCGGTGAATTCTGTCTC |
| | CCC | CC |
| | [SEQ ID NO: 100] | [SEQ ID NO: 605] |
| XD-14788 | UAUACGCGGUGAAUUCUGU | TATACGCGGTGAATTCTGTC |
| | CUC | TC |
| | [SEQ ID NO: 104] | [SEQ ID NO: 606] |
| XD-14790 | UUCGGGUUGAAAUCUGAAG | TTCGGGTTGAAATCTGAAGT |
| | UGU | GT |
| | [SEQ ID NO: 108] | [SEQ ID NO: 607] |
| XD-14792 | AUUAACUACUCUUUGGUCU | ATTAACTACTCTTTGGTCTG |
| | GAA | AA |
| | [SEQ ID NO: 112] | [SEQ ID NO: 608] |
| XD-14798 | AUUUCGAGGAUGUCGCUGG | ATTTCGAGGATGTCGCTGGG |
| | GCC | CC |
| | [SEQ ID NO: 124 | [SEQ ID NO: 609] |
| XD-14799 | UAUUUCGAGGAUGUCGCUG | TATTTCGAGGATGTCGCTGG |
| | GGC | GC |
| | [SEQ ID NO: 126] | [SEQ ID NO: 610] |
| XD-14800 | UUGAUUUCGAGGAUGUCGC | TTGATTTCGAGGATGTCGCT |
| | UGG | GG |
| | [SEQ ID NO: 128] | [SEQ ID NO: 611] |
| XD-14819 | UUCGAUGCAGGACUAGCAG | TTCGATGCAGGACTAGCAGG |
| | GCG | CG |
| | [SEQ ID NO: 166] | [SEQ ID NO: 612] |
| XD-14835 | UUAGUUGAUCCAUAGAUUC | TTAGTTGATCCATAGATTCA |
| | AGA | GA |
| | [SEQ ID NO: 198] | [SEQ ID NO: 613] |
| XD-14846 | UUACUAAGUAUUGAAGGGG | TTACTAAGTATTGAAGGGGA |
| | AAA | AA |
| | [SEQ ID NO: 220] | [SEQ ID NO: 614] |
| XD-14857 | AGGAACGUGGGUUGAACUC | AGGAACGTGGGTTGAACTCC |
| | CUU | TT |
| | [SEQ ID NO: 242] | [SEQ ID NO: 615] |
| XD-14887 | UCGCUGUUGGGGCAUAUUU | TCGCTGTTGGGGCATATTTG |
| | GGU | GT |
| | [SEQ ID NO: 302] | [SEQ ID NO: 616] |
| XD-14889 | AUUGCGUGGAGUAAGCUGG | ATTGCGTGGAGTAAGCTGGT |
| | UGG | GG |
| | [SEQ ID NO: 306] | [SEQ ID NO: 617] |
| XD-14890 | UAUUGCGUGGAGUAAGCUG | TATTGCGTGGAGTAAGCTGG |
| | GUG | TG |
| | [SEQ ID NO: 308] | [SEQ ID NO: 618] |
| XD-14901 | UGCGCAUACUGCUGAGCAA | TGCGCATACTGCTGAGCAAG |
| | GGG | GG |
| | [SEQ ID NO: 330] | [SEQ ID NO: 619] |
| XD-14904 | AGCGUUAGGGUGCGCAUAC | AGCGTTAGGGTGCGCATACT |
| | UGC | GC |
| | [SEQ ID NO: 336] | [SEQ ID NO: 620] |
| XD-14917 | UGUAUACGCCGGCUGAACG | TGTATACGCCGGCTGAACGT |
| | UGA | GA |
| | [SEQ ID NO: 362] | [SEQ ID NO: 621] |

TABLE 13
miRNA sequences with at least 50% knockdown of ATXN2

| SiRNA | Guide (antisense sequence) | Guide (antisense sequence) |
|---|---|---|
| duplex ID | (RNA) | (DNA) |
| XD-14743 | AGAAAUCGUAGACUGAGGC | AGAAATCGTAGACTGAGGC |
| | AGU | AGT |
| | [SEQ ID NO: 14] | [SEQ ID NO: 602] |
| XD-14756 | UGUACCACAACAAAGUCUG | TGTACCACAACAAAGTCTGA |
| | AAC | AC |
| | [SEQ ID NO: 40] | [SEQ ID NO: 603] |
| XD-14786 | UACGCGGUGAAUUCUGUCU | TACGCGGTGAATTCTGTCTC |
| | CCC | CC |
| | [SEQ ID NO: 100] | [SEQ ID NO: 605] |
| XD-14790 | UUCGGGUUGAAAUCUGAAG | TTCGGGTTGAAATCTGAAGT |
| | UGU | GT |
| | [SEQ ID NO: 108] | [SEQ ID NO: 607] |
| XD-14792 | AUUAACUACUCUUUGGUCU | ATTAACTACTCTTTGGTCTG |
| | GAA | AA |
| | [SEQ ID NO: 112] | [SEQ ID NO: 608] |
| XD-14800 | UUGAUUUCGAGGAUGUCGC | TTGATTTCGAGGATGTCGCT |
| | UGG | GG |
| | [SEQ ID NO: 128] | [SEQ ID NO: 611] |
| XD-14819 | UUCGAUGCAGGACUAGCAG | TTCGATGCAGGACTAGCAGG |
| | GCG | CG |
| | [SEQ ID NO: 166] | [SEQ ID NO: 612] |
| XD-14835 | UUAGUUGAUCCAUAGAUUC | TTAGTTGATCCATAGATTCA |
| | AGA | GA |
| | [SEQ ID NO: 198] | [SEQ ID NO: 613] |
| XD-14857 | AGGAACGUGGGUUGAACUC | AGGAACGTGGGTTGAACTCC |
| | CUU | TT |
| | [SEQ ID NO: 242] | [SEQ ID NO: 615] |
| XD-14890 | UAUUGCGUGGAGUAAGCUG | TATTGCGTGGAGTAAGCTGG |
| | GUG | TG |
| | [SEQ ID NO: 308] | [SEQ ID NO: 618] |
| XD-14904 | AGCGUUAGGGUGCGCAUAC | AGCGTTAGGGTGCGCATACT |
| | UGC | GC |
| | [SEQ ID NO: 336] | [SEQ ID NO: 620] |
| XD-14917 | UGUAUACGCCGGCUGAACG | TGTATACGCCGGCTGAACGT |
| | UGA | GA |
| | [SEQ ID NO: 362] | [SEQ ID NO: 621] |

Embedding of miRNAs in AAV Plasmids

[0328] miRNA sequences such as the above are envisioned to have a therapeutic benefit for patients with neurodegenerative disease when expressed from an AAV genome. Therefore, miRNA sequences were inserted into AAV cis-plasmids, flanked by AAV2 inverted terminal repeats (ITRs). miRNAs were inserted in an intron, then followed by an exon expressing green fluorescent protein (GFP). After a stop codon, a SV40 poly adenylation sequence was inserted to ensure robust polyadenylation. The miRNA-encoding transcript was inserted downstream of either a CAG or human Synapsin promoter, as Polymerase-II promoters. The sequence was also inserted into a vector downstream of an H1 promoter, with a CBh promoter controlling the expression of GFP downstream of the H1 miRNA insert. Sequences scAAV.Syn.miR1-1.XD14792.GFP.SV40 (SEQ ID NO:622), scAAV.Syn.miR1-1.XD-14887.GFP.SV40 (SEQ ID NO:623), ssAAV.CAG.miR1-1.XD-14792.GFP.SV40pA (SEQ ID NO:624), ssAAV.CAG.miR-1-1.XD-14887.GFP.SV40pA (SEQ ID NO:625) show representative cis-plasmids with miRNA XD-14792 or XD-147887 inserted. For clinical constructs, GFP sequence are replaced by inert sequence, derived from portions of the genome expected to have no effect if expressed. For Synapsin or H1-promoter containing vectors, the insert was flanked by one full-length ITR and one ITR with a truncated terminal resolution site.

[0329] AAV plasmids were generated by conventional large-scale DNA preparation and the integrity of ITRs verified by digestion with the restriction endonuclease SmaI, with the expected banding pattern observed. Plasmids were used to package genomes containing the miRNAs into AAV9-capsid encapsidated viruses (Vector Biolabs). AAVs were titered by qPCR with primers against GFP to calculate genome counts per mL.

### AAV Tail Vein Injection

[0330] Guide sequences of XD-14792 (SEQ ID NO:112) and XD-14887 (SEQ ID NO:302) are complementary to the mouse ATXN2 transcript, with one base pair mismatch at base 22 of XD-14792. Wu et al. (PLoS One (2011) 6:e28580) and Ohnishi et al. (Biochem Biophys Res Commun (2005) 329:516-21) suggest that these 3′ mismatches do not impair knockdown.

[0331] In order to assess the ability of these viruses to knockdown ATXN2 in vivo, concentrated AAV was diluted to a concentration of 3*10¹¹ genome counts per 200 microliters in 0.001% Pluronic F-68 (Gibco #24040-032) in PBS (VWR #K812-500ML). 2 month old C57Bl/6 male mice were each injected intravenously (IV) into the tail vein with 200 microliters of virus (3*10¹¹ GC total injected for viruses with CAG promoters; 2*10¹¹ GC injected for viruses with Synapsin promoters). Fifteen days after injection, mouse tissue was processed for analysis. Following carbon dioxide-induced euthanasia and transcardial perfusion with PBS, tissues were immediately snap-frozen in liquid nitrogen. Samples were subsequently stored at −80° C.

### Western Analysis of ATXN2 Levels:

[0332] Protein extraction was performed by cutting approximately 50 mg of right medial liver tissue samples on dry ice, placing each into 500 microliters RIPA buffer (TEKNOVA #50-843-016) supplemented with protease and phosphatase inhibitor tablet (Pierce #A32959), Halt protease inhibitor cocktail (Thermo #1861279) and PMSF (Cell Signaling Technology #8553S). Tissues were disrupted in a Precellys Evolution Homogenizer (tubes=0.5 mL CK14, protocol=3×45 s 5000 rpm, 15 s break, 0° C.). Samples were incubated on ice for 30 min, centrifuged for 15 min at 17,000×g at 4° C., and supernatant was transferred to a fresh tube and stored at −80° C. Protein lysates were quantitated (Pierce, 23225), resulting in approximately 8 μg/μl protein per sample.

[0333] The NuPage system (Thermo) was used for gel electrophoresis. 20 μg of each sample was loaded onto 4-12% Bis-Tris protein gels (Thermo, NP0321BOX) and run at constant 200V for 1 hr. Revert 700 (Licor, 926-11010) was used to assay for protein loading. Proteins were transferred onto PVDF membrane (EMD Millipore, IPFL00005) overnight at 4° C. using constant 30V and 90 mA. Membranes were blocked for 1 hr at RT (Rockland, MB-070). Primary antibody incubation was performed overnight rocking at 4° C., including anti-Atxn2 (1:1000, BD, 611378), anti-GFP (1:2000, CST, 2956) and beta-actin (1:2000, CST, 4970). Washing was performed 4×5 min with TBS+0.1% tween-20, and secondary antibodies were incubated for 1 hr rocking at RT (1:15,000 each of 800CW goat anti-mouse and 680RD donkey anti-rabbit, Licor). Membranes were washed again and imaging was performed on an Odyssey Fc Imaging system (Licor). Signal quantitation was by Licor image-studio lite.

[0334] FIG. 22 (left panel) shows Western analysis of tissues from animals dosed with CAG-promoter containing viruses. Liver tissue from animals dosed with viruses expressing miRNA XD-14792 miR1-1 (SEQ ID NO:1133) or XD-14887 miR1-1 (SEQ ID NO:1149) showed a substantial reduction in ATXN2 signal, as quantified by the ratio of ATXN2 immunoblot signal to Beta-actin signal, relative to a control virus lacking a miRNA (FIG. 22 (right panel)). As expected, since expression from the synapsin promoter is CNS-enriched, AAV with a synapsin promoter expressing the same miRNAs showed much less GFP expression, and did not reduce ATXN2 protein levels (data not shown). Therefore, AAV-mediated delivery of ATXN2 targeting miRNAs can modulate ATXN2 protein levels in vivo, consistent with the therapeutic objective.

[0335] To assess whether ATXN2-targeting amiRNAs expressed from AAV dosed into the cerebrospinal fluid could lower ATXN2 levels, neonatal mice were dosed via the intracerebroventricular route (i.c.v.) at postnatal day 0 with AAV-amiRNAs with either CAG or Synapsin promoters (FIG. 53A). AAV expressing XD-14792 in miR1-1 backbone (SEQ ID NO:1133) or XD-14887 in miR1-1 backbone (SEQ ID NO:1149) were used. As in the intravenous dosing experiment, the vectors also included GFP reporters to allow for identification of transduced cells. Cortex tissue was harvested after either 4 or 8 weeks, and ATXN2 protein levels assessed by Western along with GFP levels (FIGS. 53B-53C). Decreased levels of ATXN2 protein were observed relative to tissue from animals dosed with control, non-amiRNA vectors (MCS) at both 4 and 8 weeks with CAG vectors, for XD-14792 amiRNAs, and at 8 weeks with Synapsin promoter vectors.

[0336] To verify that the cell types that experienced knockdown included the therapeutically intended target cell types, i.e., neurons, fixed cortex from i.c.v. dosed animals was subject to immunofluorescence analysis with antibodies against Atxn2 and GFP. Clear evidence of reduced anti-ATXN2 immunofluorescence signal was seen in the brain of animals dosed with ATXN2 amiRNAs versus animals dosed with control vector. Within individual tissue sections, transduced and untransduced cells can be distinguished by the expression of the GFP reporter. FIG. 54A shows immunofluorescence of cortex; in tissue from animals dosed with ATXN2 amiRNA (XD-14792 in miR-1-1 backbone, SEQ ID NO:1133) expressing AAVs, comparing neurons expressing GFP with neurons without GFP shows a clear reduction in Axn2 signal in GFP expressing neurons, which will also express the active amiRNA, versus neurons without the GFP. In slices from animals treated with vector without an active amiRNA, there is not an apparent difference in Atxn2 expression level between GFP expressing and non-GFP expressing neurons. Similarly, FIG. 54B shows sections of the cerebellum from animals treated with Atxn2 miRNA (XD-14792 in miR-1-1 backbone, SEQ ID NO:1133) expressing AAV or control virus. In animals treated with Atxn2 miRNA (XD-14792 in miR-1-1 backbone, SEQ ID NO: 1133), GFP expressing neurons (which will also express the Atxn2 miRNA) have lower levels of Atxn2 signal.

### Materials and Methods

[0337] ATXN2 siRNA Transfection for Immunostaining

[0338] U2OS cells (unmodified; wildtype) were seeded at 5,000 cells/well 1 day prior to siRNA transfection in 96-well Flat Clear Bottom Black Polystyrene TC-treated microplates (Corning, P/N 3094). After siRNAs were diluted from stock solutions into Opti-MEM I Reduced Serum Medium (Gibco, P/N 31985-062), transfection mixtures were generated using Lipofectamine RNAiMAX Transfection Reagent (Invitrogen P/N 56532). Transfection mixtures were then aliquoted onto U2OS cells using the Apricot S-PIPETTE S2 and placed into the tissue culture incubator at 37 C/5% CO₂/20% 0₂.

ATXN2 siRNA Immunostaining and Imaging Protocol

[0339] Three days after transfection, cells were fixed (4% paraformaldehyde/4% sucrose final), followed by washing (PBS), blocking and permeabilization (IF buffer: 0.5% BSA, 0.2% saponin, 5% goat serum). Primary antibody (BD 611378) was applied to the cells at 1:200 in IF buffer in an overnight incubation. Following PBS washing, cells were incubated in secondary antibody (Life Technologies, Alexa Fluor Plus 488) followed by a DNA stain (Hoechst 33342). After final PBS washing, cells were incubated overnight at 4 C followed by imaging the next day. Using the Thermo Scientific Invitrogen EVOS FL Auto 2 Imaging System with a 20× objective, images were captured by autofocusing on the nuclear DNA stain, capturing the DNA stain, then auto-repositioning to capture the ATXN2 signal with a total of 9 fields imaged per well.

Artificial miRNA Construct Development

[0340] Oligonucleotides (Twist) containing Atxn2 targeting shRNAs embedded within miR-1-1 and miR-155E backbones were PCR amplified using regions common to all oligonucleotides (Forward: TAAGCCTGCAGGAATTGCCTAG (SEQ ID NO:626), Reverse: CATGTCTCGACCTGGCTTACTAG (SEQ ID NO:627)). Following amplification, PCR products were verified for the correct sized product by gel electrophoresis. Diluted PCR products were then inserted into a Xba1 and EcoRI-digested pLVX EF1alpha>mCherry CMV>Puro construct, similar to SEQ ID NO:546 using NEB HiFi DNA Assembly Master Mix (NEB P/N M5520AA). A portion of the reaction mixture was then incubated with NEB Stable Competent E. coli cells (NEB P/N C3040H) on ice, heat shocked at 42° C., allowed to recovery on ice, followed by addition of S.O.C. media and incubated at 30° C. The bacterial culture was then applied to LB agar plates with the antibiotic Carbenicillin and grown overnight at 30° C. Individual bacterial colonies were sanger sequence verified (Primer: CATAGCGTAAAAGGAGCAACA (SEQ ID NO:628)). After verifying the correct insert based on the Sanger sequencing, bacterial cultures were grown and the plasmid DNA purified and quantified.

### Virus Production

[0341] With sequence-verified constructs, lentivirus was produced using Lenti-X 293T cells (Takara) and the pc-Pack2 Plasmid Mix (Cellecta P/N CPCP-K2A). Using the Lipofectamine 3000 Transfection Kit (Invitrogen, P/N L3000-008), Lenti-X 293Ts were transfected with individual pLVX EF1a>mCherry miR insert CMV>Puro constructs and the pc-Pack2 Plasmid Mix. The transfection-containing media was aspirated and replaced with viral product media (VPM; 293T media+20 mM HEPES (gibco, P/N 15630-08)). VPM was collected 48 hours later and aliquoted into 96-well 2.0 mL Deepwell plates (Thermo, P/N 4222) and frozen at −80° C.

### Viral Transduction

[0342] Prior to adding the VPM to cells, U2OS wildtype (unmodified) and ATXN2 knockout (C43) were seeded at 5,000 cells/well 8 hours prior in 96-well Flat Clear Bottom Black Polystyrene TC-treated microplates (Corning, P/N 3094). After adding polybrene (8 μg/ml final, Cellecta, P/N LTDR1), thawed VPM was added using Apricot S-PIPETTE S2. The cells were then placed into the tissue culture incubator at 37° C./5% CO₂/20% O₂. The media on the cells containing the VPM and polybrene was removed 12 hours later and replace with fresh media (U2OS media only) and placed into the tissue culture incubator at 37° C./5% CO₂/20% O₂.

ATXN2 pLVX EF1a>mCherry miR Insert CMV>Puro Immunostaining and Imaging Protocol

[0343] Three days after changing the media (3.5 days since after the VPM), cells were fixed (4% paraformaldehyde/4% sucrose final), followed by washing (PBS), blocking and permeabilization (IF buffer: 0.5% BSA, 0.2% saponin, 5% goat serum). Primary antibodies (Atxn2; BD 611378, 1:200 dilution, mCherry; ab205402, 1:1000 dilution) were applied to the cells in IF buffer in an overnight incubation. Following PBS washing, cells were incubated in secondary antibody (Life Technologies, Alexa Fluor Plus 488 and Alexa Fluor Plus 647) followed by a DNA stain (Hoechst 33342). After final PBS washing, cells were incubated overnight at 4° C. followed by imaging the next day. Using the PerkinElmer Operetta CLS High-Content Analysis System with a 20× objective, non-confocal images were captured by autofocusing the bottom of the plate, then capturing the DNA signal, the ATXN2 signal and the mCherry signal with a total of 9 fields imaged per well.

miR-155 and miR-1-1 Transfection and ATXN2 Western Blot

[0344] A version of the miR-155 scaffold was engineered into an artificial miRNA and used in a mouse in vivo proof of concept study to knockdown HTT¹⁰. ATXN2-targeting guide sequences and controls were incorporated into this scaffold sequence, which we term “miR-155M,” and assayed for protein knockdown after transfection of U2OS cells.

[0345] The “miR-1-1E,” where “E” signifies “enhanced,” is taking the human miR-1-1 scaffold and simply introducing a downstream CNNC motif.

[0346] To perform the transfection, U2OS cells were plated at 90,000 cells/well in a 12-well dish, 24 hours later, transfected 2 micrograms/well of the 8 EF1alpha>mCherry constructs (7 with inserts, 1 control) with Lipofectamine 3000 (ThermoFisher). Specifically, each transfection used 2 μL enhancer reagent, 1.5 μL lipofectamine reagent; diluted samples in water to uniform amounts).

[0347] Following day imaging with Evos, a good number of mCherry cells observed. Much higher expression level observed in the control vector without insert.

[0348] Wells were aspirated and replaced with 1 ml of media with 1 microgram/mL puromycin. Selection occurred over the weekend and then puromycin was removed for recovery.

[0349] Three days post-selection, many dead cells were observed. Imaging of mCherry indicated there remained a good number of bright, surviving cells, however. Aspirated media and replaced with prewarmed media containing 200 ng/mL puromycin (a 5-fold dilution).

[0350] Two days later (7 days post-transfection), cells were lysed in RIPA buffer with Pierce phosphatase and protease inhibitor tablet.

[0351] Western blot was performed and imaged on Odyssey Fc (Licor).

[0352] Quantitation of ATXN2 band and control α-tubulin signal intensity was performed with ImageStudio software (LiCor).

### Generation of ATXN2 Knockout in U2OS Cells

[0353] ATXN2 knockout cells in U2OS cells was performed using a Cas9-gRNA RNP nucleofection approach. In brief, crRNA and tracrRNA (IDT) were duplexed at equimolar ratios and complexed with recombinant Cas9 (IDT v3) and nucleofected using SF buffer and CM130 program (Lonza 4D nucleofector).

[0354] CRISPR guide RNAs were selected from two CRISPR library sources. Three CRISPR guide RNAs (gATXN2_1, gATXN2_2, gATXN2_3) were chosen from the Cellecta CRISPR cutting library (one was not selected due to its upstream position before the 2^{nd} ATG). Two additional guides (gATXN2_4 & gATXN2_5) were chosen from the another CRISPR cutting library reported by Bassik et al.²⁶. Additionally, a non-targeting control guide was chosen from the Cellecta library. CRISPR guide RNA sequences as well as DNA format are provided in Table 14.

TABLE 14
CRISPR Guide RNA Sequences for Targeting ATXN2

| Name | Guide DNA Sequence | Guide RNA Sequence |
|---|---|---|
| gATXN2_1 | AAGTTACTCACCGTAGACTG | AAGUUACUCACCGUAGACUG |
| | [SEQ ID NO: 629] | [SEQ ID NO: 1169] |
| gATXN2_2 | AATAGAGAAGTCATATCCTG | AAUAGAGAAGUCAUAUCCUG |
| | [SEQ ID NO: 630] | [SEQ ID NO: 1170] |
| gATXN2_3 | GTATTGGAAATACCCCCAGT | GUAUUGGAAAUACCCCCAGU |
| | [SEQ ID NO: 631] | [SEQ ID NO: 1171] |
| gNTC | GTAGCGAACGTGTCCGGCGT | GUAGCGAACGUGUCCGGCGU |
| | [SEQ ID NO: 632] | [SEQ ID NO: 1172] |
| gATXN2_4 | GTGAGTTCACCTGCATCCCA | GUGAGUUCACCUGCAUCCCA |
| | [SEQ ID NO: 633] | [SEQ ID NO: 1173] |
| gATXN2_5 | GCTATCAGTGCTAAAGTGAA | GCUAUCAGUGCUAAAGUGAA |
| | [SEQ ID NO: 634] | [SEQ ID NO: 1174] |
| gCD81 | GTTGGCTTCCTGGGCTGCTA | GUUGGCUUCCUGGGCUGCUA |
| (cutting | [SEQ ID NO: 635] | [SEQ ID NO: 1175] |
| control that | | |
| cuts the CD81 | | |
| gene) | | |

[0355] Post nucleofection, bulk population of cells were allowed to recover for 5 days and lysed for western blot analysis.

### U2OS Clone Selection

[0356] The bulk population of cells were also single cell sorted into 96-well plates for clonal expansion. Because guides gATXN2_1 and gATXN2_5 had the most decrease in ATXN2 protein signal by western blot (˜90% reduction), we proceeded with these cells for single cell cloning. After trypsinization and single cell suspension, a SONY SH800S was used to gate for singlet cells and to sort directly into U2OS growth media. Cells were allowed to grow for ˜2-3 weeks and lysed for genomic DNA extraction for Sanger sequencing and protein extraction for western blotting (10 μg of protein used per lane in this setting)

### ICE Confirmation of Clones

[0357] Genomic DNA was extracted using a Qiagen Blood and Tissue Kit. Genomic primers were designed to amplify the genomic region surrounding the guide RNA cut site with the goal of sequencing the cut site by Sanger sequencing and validating an out-of-frame indel pattern consistent with a single clone.

[0358] Primer Blast (https://www.ncbi.nlm.nih.gov/tools/primer-blast/) was used with the following settings: For guide 1, we turned off repeat filter and low complexity filter due to the repetitive nature of ATXN2, but otherwise kept the default settings. The import function of Snapgene was used to import “6311” from NCBI. 500 upstream and 500 downstream bases from the protospacer sequence was used to as input for primer blast. Product size was set for 400-1000 and 2 distinct primer pairs were selected (Table 15).

TABLE 15
ATXN2 PCR primers

| Primer Name | Primer Sequence |
|---|---|
| Forward primer | AAGTTTCCTGAGGCCTCCCC [SEQ ID |
| (ICE_gATXN2_1_set1_Fwd) | NO: 636] |
| Reverse primer | TCCAGGCAAGCAGTGCATAG [SEQ ID |
| (ICE_gATXN2_1_set1_Rev) | NO: 637] |
| Product length 522 | |
| Forward primer | AGTTTCCTGAGGCCTCCCC [SEQ ID NO: 638] |
| (ICE_gATXN2_1_set2_Fwd) | |
| Reverse primer | CCCTACCTGTTGTGGGTCTC [SEQ ID |
| (ICE_gATXN2_1_set2_Rev) | NO: 639] |
| Product length 539 | |

[0359] Furthermore, amplicon internal sequencing primers were designed for Sanger sequencing in both forward and reverse directions to read the cut site (Table 16). The primer(+) algorithm (http://www.biology.wustl.edu/gcg/prime.html) was used to design the sequencing primers on this web interface (https://www.eurofinsgenomics.eu/en/ecom/tools/sequencing-primer-design/).

TABLE 16
ATXN2 Sequencing Primers

| Primer Name | Primer Sequence |
|---|---|
| ICE_gATXN2_1_Rseq | AGAGCCATCCTTAGGTAGCC [SEQ ID NO: 640] |
| ICE_gATXN2_1_Fseq | GAGGTTTAATTGACTCATGCTCTG [SEQ ID |
| | NO: 641] |

[0360] For guide 5, we turned off repeat filter but turned on the low complexity filter, but otherwise kept the default settings. 500 upstream and 500 downstream bases from the protospacer sequence was used to as input for primer blast. Product size was set for 400-1000 and 2 distinct primer pairs were selected (Table 17).

TABLE 17
ATXN2 Primer Sequences

| Primer Name | Primer Sequence |
|---|---|
| Forward primer | AAAACACACCGGCATTTCCC [SEQ ID NO: 642] |
| (ICE_gATXN2_5_set1_Fwd) | |
| Reverse primer | CCTGGGCAACAGAACGAGAC [SEQ ID |
| (ICE_gATXN2_5_set1_Rev) | NO: 643] |
| Product length 853 | |
| Forward primer | AGCAAAACACACCGGCATTT [SEQ ID |
| (ICE_gATXN2_5_set2_Fwd) | NO: 644] |
| Reverse primer | ATCACGCCACTGCATTCCA [SEQ ID NO: 645] |
| (ICE_gATXN2_5_set2_Rev) | |
| Product length | |

[0361] Internal sequencing primers were designed by the primer(+) algorithm (Table 18).

TABLE 18
ATXN2 Sequencing Primers

| Primer Name | Primer Sequence |
|---|---|
| ICE_gATXN2_5_Fseq | TCATGAGCATCCACAAGAACAG [SEQ ID NO: 646] |
| ICE_gATXN2_5_Rseq | ACGTGTGTGAGTGTAACTGATTGC [SEQ ID |
| | NO: 647] |

[0362] PCR was performed with NEBNext Ultra II Q5 Master Mix (NEB, M0544S) with gDNA and primer pairs indicated above. Amplified products were visualized by agarose gel and correctly sized amplicons were gel purified and submitted for Sanger sequencing with forward and reverse sequencing primers. Chromatogram (.abi files) results were uploaded to the Inference of CRISPR Editing (ICE) tool²⁷ https://ice.synthego.com/#/ for deconvolution of Sanger reads to identify indels.

[0363] Clone 43 from guide 5 nucleofection, which verified both by western and Sanger sequencing as a bona fide knock-out clone, was carried forth for further studies.

### Ataxin-2 Western Blot

[0364] To prepare lysates, 1×RIPA (Teknova, Tris-HCl 50 mM, NaCl 150 mM, 1% Triton X-100, Sodium Deoxycholate 1%, SDS 0.1%, EDTA 2 mM, pH 7.5) was supplemented with Pierce protease/phosphatase tablet (Thermo, A32959) and incubated 15 min on ice, spun down at 17,000×g at 4° C. for 15 min.

[0365] Pierce BCA kit (Thermo Scientific, 23225) was used for protein quantitation and 20 μg of protein was loaded per lane in SDS-PAGE gel electrophoresis (NuPage Bis Tris, Thermo Scientific).

[0366] Samples were prepared with 10 or 20 micrograms of protein, 4×LDS loading buffer (NP0007), 10× sample reducing agent (NP0004), water to 20 μl. Samples were heated at 70° C. for 10 min.

[0367] Protein size ladders were Precision plus protein dual color standard (Bio-rad, 1610374) or Chameleon® Duo Pre-stained Protein Ladder (Licor, 928-60000).

[0368] Samples were loaded onto 1.0 mm×10 well 4-12% Bis-Tris protein gel (NP0301PK2) and gel electrophoresis was run with MOPS SDS running buffer (NP0001) for 1 hr 20 min at constant 200V to resolve higher molecular weight bands.

[0369] Tris/glycine transfer buffer was used (Bio-rad, 1610734) without methanol. All components including sponges, filter paper, gel, and membrane were equilibrated at least 15 min with transfer buffer. The PVDF membrane was dipped in methanol for 15 seconds prior to equilibration with transfer buffer. Wet transfer was performed in a Mini Trans-Blot Electrophoretic Transfer Cell (Bio-rad, 1703930) overnight at 4° C. at constant 30V, 90 mA.

[0370] After overnight transfer, membranes were air dried for 1 hr at RT. Membranes were rinsed with 1×TBS (no tween) and blocked in Odyssey blocking buffer (LI-COR) at room temperature rocking for 30 min-1 hr.

[0371] Membranes were incubated with primary antibodies overnight at 4° C. at 1:1000 dilutions in Odyssey blocking buffer with 0.1% Tween-20. The mouse ATXN2 antibody (BD, 611378) and Rabbit α-Tubulin antibody (CST, 21445) was used as a loading control.

[0372] Membranes were washed 4×5 min with TBS-0.1% Tween-20.

[0373] Membranes were treated with two secondary antibodies for 1 hr rocking at RT at 1:20,000 dilutions in Odyssey blocking buffer with 0.1% Tween-20 and 0.01% SDS.

[0374] The secondary antibodies were IRDye 800CW Goat anti-mouse IgG, (Li-cor, 926-32210) and IRDye 680RD Donkey anti-rabbit IgG (Li-cor, 926-68073). Membranes were washed 4×5 min with TBS-0.1% Tween-20 and rinsed with TBS (no Tween) before imaging on a LI-COR Odyssey scanner (Fc) with both 700 and 800 channels.

### Ataxin-2 FACS

[0375] Cells were trypsinized, transferred to a 96-well v-bottom format, each treatment assayed in triplicate, and washed in wash buffer (PBS/0.5% BSA (no EDTA)) and fixed with ice-cold methanol dropwise, incubated on ice for 10 min, then 200 μl of PBS were added and cells were rocked overnight at 4° C.

[0376] Cells were spun down at 1000×g, 5 min cold and washed twice with cold FACS wash buffer (PBS/0.5% BSA/2 mM EDTA/0.2% saponin). Primary antibody (BD 611378) was applied at 1:100 and incubated for 1 hr, rocking in 4° C. The buffer was supplemented with 5% goat serum to reduce non-specific binding. Cells were washed twice in cold FACS wash buffer. Cells were incubated in 1:100 secondary antibody (PE/Cy7 Biolegend clone RMG1-1) with cells resuspended in cold FACS wash buffer with 5% goat serum and incubated for 1 hr on ice. Cells were washed twice and resuspended in cold FACS wash buffer and sampled on an Attune (Thermo Scientific).

### Intracerebroventricular Injections

[0377] For intracerebroventricular injections, postnatal day 0 pups were cryo-anesthetized and injected at a depth of 2 mm using Hamilton syringes, delivering a maximum volume of 3 uL per each ventricle.

### Immunofluorescence Analysis

[0378] Animals dosed i.c.v with rAAV were euthanized 4 weeks after dosing with rAAV, fixed overnight in 4% paraformaldehyde. Tissue was then cryopreserved in cold 30% sucrose, then embedded in OCT media and frozen. 5 micrometer frozen sections were prepared on a cryostat. For staining, sections were thawed and dried, washed twice in PBS, heated in 95 C antigen retrieval solution (citra antigen retrieval, pH 6.0, Vector Labs #H-3300-250) for 10 minutes, then cooled for 30 minutes at room temperature. Sections were then washed 5 minutes each in water, PBS, and PBS-0.25% Triton-X-100, and 10 minutes in PBS. Sections were then blocked with 5% goat serum in PBS for 30 minutes in humidified chambers. Sections were treated with primary antibody solution in PBS+1% BSA, including: Mouse anti-ATXN2 antibody (BD #611378), 1:50; Rabbit anti-GFP antibody (Cell Signaling Technologies #25555), 1:2000 overnight at 4 C. After 3× washes in PBS, sections were incubated with secondary antibody solutions in PBS+1% BSA, including: goat anti-mouse Alexa Fluor 555 (Thermo Scientific #A21424) 1:250, Goat anti-Rabbit Alexa Fluor 488 (Thermo Scientific #A11008), 1:250 for 30 minutes at room temperature. Sections were then washed, and mounted in VectaShield PLUS with Dapi (H-2000-10). Images were collected with a Revolve microscope (Discover Echo).

### Example 2: Identification of High Performing AmiRNAs by Tiled Screen of ATXN2 Targeting miRNAs in Lentiviral Format

[0379] As an alternative approach to siRNA screening followed by embedding of the associated guide sequences in miRNA backbones and testing one-by-one, pooled screening of ATXN2-targeting miRNAs was conducted (“Deep Screen 1”).

### ATXN2 Target Sequences

[0380] Homo sapiens ATXN2 mRNA (NM_002973, transcript variant 1, SEQ ID NO:2) was used to identify target sequences for the artificial miRNAs. All human and primate cross-reactive sequences were identified and 22-nt guide sequences were designed taking into consideration criteria for effective shRNA and miRNA sequences, including the preference for A or U at guide position 1. Therefore, taking into consideration the 22 nucleotide antisense sequences complementary to the Ataxin-2 construct, if the first guide base was G or C this was converted to a ‘U’, whereas sequences that began with A or U were not changed from the base complementary to the corresponding position on the ATXN2 transcript. As above, U bases are encoded as T in the lentiviral expression construct. In total 2,381 ATXN2-targeting sequences were introduced into a modified variant of the miR-16-2 backbone. Passenger sequences (the sequence on the opposite side of the miRNA stem from the guide sequence) were generated following the rules in Table 8 for this backbone.

### Toxicity Controls

[0381] By examining the abundance of elements of the library in cells that had been allowed to grow for lengthy periods of time versus initially transduced cells, the pooled screen can identify elements that alter cellular proliferation or viability. To calibrate the dynamic range of the assay, additional toxic elements were added to the library. Ten essential genes were selected with ten shRNAs each (removing 2 sequences that had polyT sequences deemed problematic because they may serve as termination signals for PolIII). To identify the “essential” gene list, genetic dropout screens performed in parallel with shRNA and CRISPR guide RNAs in the K562 cancer cell line²¹ were examined. Across both screens, genes were rank ordered by shRNA lethality, specifically genes that scored highly in the K562 shRNA dropout by combined Castle score (negative is more lethal). Since toxicity screen was performed in Hela cells, the K562 top genes were intersected and identified the top 10 genes that also scored highly (bayesian factor >100) in a Hela CRISPR cutting dropout screen²². The essential genes selected were: COPB1, COPB2, DHX15, EIF3A, EIF4A3, NUP93, PRPF8, PSMB6, PSMD1, and SF3B2.

[0382] To select 10 shRNA targeting each gene, the 25 shRNA/gene in a previously published shRNA library were considered and rank ordered by their performance in the dropout screen¹⁵. Specifically, the shRNAs were rank-ordered by the dropout metric (read counts in replicate 1 and replicate 2 divided by plasmid reads), and the top performing shRNAs that had at least one count across all replicates were selected.

### GFP Controls

[0383] GFP controls (n=50) were designed to target two different GFP reporter systems. The first system involved tagging endogenous ATXN2 with the 11^{th} beta strand of GFP (GFP₁₁) in conjunction with overexpression of GFP₁₋₁₀ to constitute a self-complementary GFP system²³, and the second is a GFP-stop-ATXN2 overexpression reporter. The 11^{th} beta strand of GFP was targeted by entirely tiling the transcript with 28 individual 21 nt shRNA, adding an A at guide position 1 to form 22 nt oligomer sequences. Additional shGFP (n=22) were selected to target GFP₁₋₁₀ using the Design portal of the Broad Institute Genetic Perturbation Platform (https://portals.broadinstitute.org/gpp/public/seq/search), using the GFP₁₋₁₀ sequence as input. Although the split GFP system was not ultimately used to read out ATXN2 levels, the 50 shGFP still target the GFP-stop-ATXN2 reporter.

### ATXN2 Transcript Scrambled Controls

[0384] Neutral controls were designed that should not have any effect in both the efficacy and toxicity screens. These elements can be used for baseline normalization. The guide sequences targeting ATXN2 were scrambled and 974 of these scrambled guide sequences used to construct amiRNAs as before. After scrambling, the same rules for the first base as with targeting sequence were imposed. Following this correction step, the GC content was adjusted by converting one of the guide bases 2-22 that were A or T, randomly selected, to G or C, randomly chosen, such that overall this set of scrambled controls maintains similar GC content relative to the ATXN2-targeting sequences.

### Promoter Selection

[0385] The H1 promoter, an RNA polymerase III promoter, was selected to drive artificial miRNA expression as many groups have used it to achieve robust target knockdown.

### Pooled Library Cloning

[0386] The oligonucleotide pool was synthesized on chip (oligo length 172 bp, Agilent), PCR amplified, and cloned into the pRSICPH1 vector (Cellecta) by Bpl1 restriction digestion and T4 ligase ligation. Each individual miRNA cassette was expressed under the control of an H1 promoter and subsequently followed by a short constant region and 17 bp barcode sequence that uniquely tags each miRNA. The elements were designed to contain both miRNA and barcode tags to enable multiple ways to amplify and sequence the constructs to readout the pooled screens. For instance, if PCR amplification bias were to confound the representation of high GC content sequences²⁴, comparison of the abundance of amplicons containing the guide sequence versus the abundance of amplicons containing the FREE barcode would resolve any discrepancies. FREE barcodes were used as they are indel-correcting and robust to DNA synthesis and NGS errors²⁵. The library was checked by Sanger sequencing and next-generation sequence (Illumina) to verify lack of synthesis errors, >99% amiRNA and FREE barcode were correctly paired, and the fold-representation between the top and bottom amiRNAs were within four fold-change.

### Viral Production

[0387] Lenti-X 293T (Takara) cells were used to produce lentivirus by transfection of 4^{th} generation packaging plasmids (Lenti-X Packaging single shots, Takara) followed by viral concentration with Lenti-X concentrator and resuspension in PBS. Virus was titered in U2OS and Hela cells by infection and antibiotic selection followed with estimation of viral units and multiplicity of infection (MOI) by Cell-Titer-Glo (Promega).

### Cell Culture and Transfections

[0388] U2OS cells and the GFP-ATXN2 reporter cell line were cultured in RPMI-1640 supplemented with 10% fetal bovine serum (FBS) and penicillin/streptomycin/glutamine. Hela cells were cultured in DMEM supplemented with 10% fetal bovine serum (FBS) and penicillin/streptomycin/glutamine.

### Efficacy Screen

[0389] Two pooled lentiviral miRNA screens for on-target efficacy were performed to identify miRNA that diminish ATXN2 protein signal, reading out ATXN2 levels by 1) an exogenous GFP-stop-ATXN2 reporter or 2) endogenous ataxin-2 antibody in a FACS assay. Cells were infected with the pooled lentiviral library at a multiplicity of infection (MOI) of 0.1 into (˜5×10⁷ cells) with polybrene (8 μg/ml, EMD Millipore) and distributed across four T225 flasks. Two days post-infection, U2OS cells were selected with puromycin at 2 μg/ml. The MOI was confirmed by cell-titer-glo at day 5 (3 days after selection) in a 96 well format. An unsorted fraction (7×10⁶ cells) was collected at day 7 as a reference control. The remaining cells were washed in wash buffer (PBS/0.5% BSA (no EDTA)) and fixed with ice-cold methanol dropwise while vortexing on day 7, at a ratio of 1 ml methanol/2×10⁶ cells, incubated on ice for 10 min, then 10× volumes of PBS were added and cells were rocked overnight at 4° C.

[0390] Cells were spun down at 1000×g, 5 min cold (Corning 500 ml centrifuge tubes, 431123) and resuspended in cold FACS wash buffer (PBS/0.5% BSA/2 mM EDTA/0.2% saponin). Cells were counted and resuspended in 2×10⁶/ml in cold FACS wash buffer.

[0391] Primary antibody (BD 611378) was applied at 1:200 and incubated for 1 hr, rocking in 4° C. The buffer was supplemented with 5% goat serum to reduce non-specific binding.

[0392] Cells were washed twice in cold FACS wash buffer. Cells were incubated in 1:200 secondary antibody (PE/Cy7 Biolegend clone RMG1-1) with cells resuspend in 2×10⁶/ml cold FACS wash buffer with 5% goat serum and incubated for 1 hr on ice. Cells were washed twice in and resuspended in cold FACS wash buffer at 4-5×10⁶/ml to achieve 1000-2000 events per second on the Sony SH800S (approximately the maximal stable cell velocity on the instrument). Samples were filtered through a cell strainer directly into FACS tubes (FALCON 352235). Sorted cells were collected in 3 mL PBS/10% FBS in 15 ml conicals.

### Dropout Screen

[0393] A pooled lentiviral miRNA screen for off-target toxicity was additionally performed, by identifying miRNA dropout between an early and late timepoint. HeLa cells were infected with polybrene (8 μg/ml, EMD Millipore) at a multiplicity of infection of 0.1 at 1000× representation (that is, the number of cells was >10,000× the number of library elements). Two days post-infection, HeLa cells were selected with puromycin at 0.5 micrograms/mL. Cells were passaged for a total of 10 doublings (˜16 days). The screen was performed in triplicate (3 separate infections).

### DNA Processing

[0394] Genomic DNA was extracted from each sample using the Machery Nagel Blood L kit (FACS collections; early and late collection timepoints). A two-step PCR was conducted. In a first PCR reaction, an amplicon spanning both the guide and passenger sequences, and downstream past the FREE barcode, was generated. In a second PCR reaction, a nested amplicon was generated spanning either the guide and passenger sequence, or the FREE barcode. The second PCR was designed to incorporate Illumina binding sequences (P5 and P7) and sample index barcodes to enable demultiplexing on Illumina sequencing platforms. Each distinct sample (that is, FACS collection, or timepoint) was given a distinct index. Specifically, the guide and passenger amplicon was single-indexed, with an i7 sequence included upstream of the 6 nt sample barcode and P7 sequence. In contrast, the FREE barcode amplicon was single-indexed on the P5 end and no i7 sequence was included on the P7 end. Samples were sequenced on an Illumina MiSeq such that guide and passenger sequences can be matched in paired reads, with read 1 using a custom primer reading the 22 nt guide sequence, and read 2 being the standard Illumina primer reading the passenger sequence. FREE barcodes were also separately amplified and sequenced, with read 1 being a custom primer reading the 17 nt FREE barcode, and read 2 being a custom primer reading the 6 nt sample barcode. In general, calculations of abundances were highly similar for FREE barcode derived amplicons and guide/passenger sequence containing amplicons (using a lookup table of the association between FREE barcodes and guide/passenger sequences). Analyses below focused on counts of the guide sequences.

### Computational Analysis

[0395] Occurrences of each guide sequence were counted, without tolerating sequencing or other errors (that is, no mismatches to the library input guide sequences were tolerated), in read 1 sequences, which directly sequences amiRNA guide sequences. To estimate ATXN2 knockdown efficiency, the abundance of guide sequence counts in the ATXN2 high FACS collection was divided by the abundance of guide sequence counts in the ATXN2 low FACS collection. Sequences that effectively knock down ATXN2 are enriched in the ATXN2 low FACS collection.

[0396] To assess whether the guide sequence influences cytotoxicity or reduces proliferation, the ratio of counts of each guide sequence for a pool of cells collected 16 days after library transduction, versus the ratio of counts for the library collected 18 hours after library transduction, were measured.

[0397] Data was highly consistent across replicates. FIG. 23A plots the high/low count ratios for two independent replicates against one another. Most points fall along y=x, indicating good correlation. FIG. 23B plots the matrix of Spearman correlation coefficients for count values for each condition against all others. The replicates are hierarchically clustered, and clustered blocks represent similar conditions. Note the strong anticorrelation between low and high conditions, as expected given that guides that deplete ATXN2 are expected to be differentially present in the low and high conditions. Note also that conditions where ATXN2 signal was visualized by antibody staining against endogenous Ataxin-2 protein, and conditions where the signal was visualized by fluorescence of the ATXN2 GFP reporter, correlate.

[0398] Following the calculation of count ratios, a normalization procedure was taken to rank ATXN2 targeting sequences by their ability to deplete ATXN2 signal. In FIG. 24, histograms for the distribution of high and low condition guide sequence counts for ATXN2 targeting guides, top trellis, and scrambled sequences, bottom trellis, are shown. The ATXN2 scrambled sequences exhibit a sharp, unimodal distribution of ratios of counts in the high and low ATXN2 FACS conditions. The median ratio from this distribution was taken to be no-effect, and the ATXN2 depleting effect of ATXN2 targeting miRNAs was therefore calculated by subtracting this (log base 2-transformed) value.

[0399] The ability of guide sequences to knock down ATXN2 and the presence of any altered proliferation or cytotoxicity were examined. FIG. 25 shows a plots of three classes of guide sequences in this experiment: ATXN2 targeting sequences, ATXN2 scrambled sequences, and amiRNAs targeting essential genes (predicted to be toxic). As expected, the log base-2 ATXN2 signal depletion (the scramble-baseline-corrected ATXN2 depletion in counts from high to low ATXN2 FACS conditions) was centered around 0 (no effect). However, many of these sequences exhibited remarkable shifts in abundance at a late collection timepoint, 16 days after transduction, versus an early timepoint after transduction. This is consistent with the reported essentiality for these sequences and demonstrates that this system can elicit cellular toxicity or proliferation impairment.

[0400] ATXN2 targeting guide sequences fall along a much wider spectrum along the axis of ATXN2 signal depletion compared to amiRNAs targeting essential genes or scrambled sequences, with targeting sequences exceeding 5 logs (base 2), corresponding to approximately 32-fold depletion of cells expressing these amiRNAs in high ATXN2 FACS collections versus low ATXN2 FACS collections.

[0401] The near complete tiling of the ATXN2 transcript enables the detection of ‘hotspots’ of Ataxin-2 targeting guide sequences, defined by the proximity of their complementary regions of the Ataxin-2 transcript. FIG. 26 shows a plot of the knockdown efficacy, as measured by the depletion of counts for a given guide from the high ATXN2 FACS collection versus low ATXN2 FACS collection. Across the transcript, multiple regions where adjacent ATXN2 targeting guide sequences exhibit strong ATXN2 knockdown are noted. FIG. 27 shows a ‘zoom-in’ of regions within the 3′ UTR of ATXN2, and highlights guide sequences (as dark points) with unusually high ATXN2 lowering, as measured by the count reduction.

### Small RNAseq Confirmation of Pri-miRNA Processing Precision in the Pooled Screen

[0402] Guide sequences are excised from a miRNA stem by successive Drosha and Dicer processing. Each enzyme cuts the RNA. In the case of the miR backbone used for this tiled screen of ATXN2, the guide sequence from the corresponding endogenous miRNA (miR 16-2) is excised from the upstream, 5 prime arm, and therefore the guide sequence is cleaved from the parent stem at the 5′ side by Drosha. Because the position of the 5′ cut site determines the composition of the seed sequence, bases 2-7 counting from the 5′ nucleotide, the cutting position is important in determining both on- and off-target activity of the resulting guide sequence. Therefore, small RNAseq was conducted to assess the position of this cut.

[0403] The tiling library, in packaged lentiviral form, was transduced at high multiplicity of infection into U2OS cells. After selection by puromycin to eliminate untransduced cells (the library vector contains a puromycin selection cassette), RNA was extracted by standard methods, and small RNA was purified and ligated with adapters to enable small RNA sequencing using the Nextflex small RNAseq kit v3. After PCR amplification, the resulting library was subject to next-generation sequencing on an Illumina MiSeq. A high proportion of reads had sequences of length 21, 22, and 23 nucleotides, with a peak at 22 nucleotides, consistent with the detection of processed miRNAs (guide and passenger sequences). To examine the precision of 5′ processing, the number of observations of 22-mer sequences matching several models of processed guide sequences were calculated. In one model, the guide sequence was assumed to be correctly processed. In other models, the guide sequence was assumed to be processed either upstream or downstream of the expected nucleotide. If the guide sequence is cut upstream of the intended nucleotide, then the expected upstream bases are incorporated from the miRNA backbone sequence. If the guide sequence is cut downstream of the intended nucleotide, then the first base of the resulting guide sequence is downstream of expected. Because the scrambled sequences in the library do not generally overlap from one another, for example, lowering the likelihood of ‘collisions’ where a guide sequence processed by excision from the stem at a nucleotide one downstream of the intended first nucleotide is the same as a guide sequence aligning to a position in the ATXN2 transcript one bp shifted, the processing position across all scrambling sequences was analyzed and averaged to estimate the most probable cutting position. FIG. 28 plots the percent of reads of the guide sequence with cut position at each nucleotide relative to the intended first nucleotide, and shows a very high proportion of reads begin at the intended position.

Additional ATXN2 Targeting Sequences from Pooled Screen

[0404] By examination of the knockdown efficacy against ATXN2 (as measured by depletion from the high versus low ATXN2 FACS collections) across the positions of complementarity to the ATXN2 transcript, several regions of interest were noted where clusters of high performing ATXN2-targeting guide sequences were observed. Table 19 lists these guide sequences, the targeting position of the guide sequences relative to the ATXN2 transcript (SEQ ID NO:2), the guide sequences inserted into the miRNA16-2 backbone (which are also the highest probability sequence that will be generated in the cell according to the above small RNAseq experiments), and the passenger sequences generated for the miR16-2 backbone. The guide sequences, miRNA16-2 formatted passenger sequences, and amiRNA sequences are provided in Table 19 in RNA format and DNA format (e.g., for insertion into a plasmid for AAV). Exemplary passenger RNA sequences (e.g., not modified for a specific miRNA backbone) are also provided in Table 19 in both RNA and DNA format. Efficacy of ATXN2 knockdown is represented by the signal depletion column. Altogether, sequences with high efficacy and low potential for dropout may represent good candidates to incorporate into therapeutic vectors targeting ATXN2.

TABLE 19
Guide sequences in ‘hot spots’ targeting ATXN2 from tiled screen and corresponding passenger and miRNA sequences

| | | | | | Mean | | | |
|---|---|---|---|---|---|---|---|---|
| | | | | | Atxn2 | | | |
| Guide | Guide | 16_2_format_ | 16_2_format_ | siRNA | Log2 | | | |
| Sequence | Sequence | passenger | passenger | Passenger | Signal | Atxn2 | amiRNA Sequence | amiRNA |
| (DNA) | (RNA) | (DNA) | (RNA) | (RNA) | Depletion | Position | (DNA) | Sequence (RNA) |
| TACCACAACAAA | UACCACAACAAA | ATGTTCAGACCC | AUGUUCAGACCC | AUGUUCAGACUU | -2.75633 | 1157 | ACCGGACATACTTGTT | ACCGGACAUACUUGUU |
| GTCTGAACAT | GUCUGAACAU | TGTTGTGGTT | UGUUGUGGUU | UGUUGUGG | | | CCACTCTACCACAACA | CCACUCUACCACAACA |
| [SEQ ID | [SEQ ID | [SEQ ID | [SEQ ID | [SEQ ID | | | AAGTCTGAACATTAGT | AAGUCUGAACAUUAGU |
| NO: 648] | NO: 1176] | NO: 761] | NO: 1289] | NO: 993] | | | GAAATATATATTAAAA | GAAAUAUAUAUUAAAA |
| | | | | | | | TGTTCAGACCCTGTTG | UGUUCAGACCCUGUUG |
| | | | | | | | TGGTTTAGTGTGACAG | UGGUUUAGUGUGACAG |
| | | | | | | | GGATACAGCAACTATT | GGAUACAGCAACUAUU |
| | | | | | | | TTATCAA | UUAUCAA |
| | | | | | | | [SEQ ID NO: 877] | [SEQ ID NO: 1405] |
| TTACCACAACAA | UUACCACAACAA | TGTTCAGACTCC | UGUUCAGACUCC | UGUUCAGACUUU | -2.02091 | 1158 | ACCGGACATACTTGTT | ACCGGACAUACUUGUU |
| AGTCTGAACA | AGUCUGAACA | GTTGTGGTAT | GUUGUGGUAU | GUUGUGGU | | | CCACTCTTACCACAAC | CCACUCUUACCACAAC |
| [SEQ ID | [SEQ ID | [SEQ ID | [SEQ ID | [SEQ ID | | | AAAGTCTGAACATAGT | AAAGUCUGAACAUAGU |
| NO: 649] | NO: 1177] | NO: 762] | NO: 1290] | NO: 994] | | | GAAATATATATTAAAT | GAAAUAUAUAUUAAAU |
| | | | | | | | GTTCAGACTCCGTTGT | GUUCAGACUCCGUUGU |
| | | | | | | | GGTATTAGTGTGACAG | GGUAUUAGUGUGACAG |
| | | | | | | | GGATACAGCAACTATT | GGAUACAGCAACUAUU |
| | | | | | | | TTATCAA | UUAUCAA |
| | | | | | | | [SEQ ID NO: 878] | [SEQ ID NO: 1406] |
| TGTACCACAACA | UGUACCACAACA | GTTCAGACTTCT | GUUCAGACUUCU | GUUCAGACUUUG | -3.6909 | 1159 | ACCGGACATACTTGTT | ACCGGACAUACUUGUU |
| AAGTCTGAAC | AAGUCUGAAC | TTGTGGTACT | UUGUGGUACU | UUGUGGUA | | | CCACTCTGTACCACAA | CCACUCUGUACCACAA |
| [SEQ ID | [SEQ ID | [SEQ ID | [SEQ ID | [SEQ ID | | | CAAAGTCTGAACTAGT | CAAAGUCUGAACUAGU |
| NO: 603] | NO: 40] | NO: 763] | NO: 1291] | NO: 995] | | | GAAATATATATTAAAG | GAAAUAUAUAUUAAAG |
| | (same as | | | | | | TTCAGACTTCTTTGTG | UUCAGACUUCUUUGUG |
| | guide in XD- | | | | | | GTACTTAGTGTGACAG | GUACUUAGUGUGACAG |
| | 14756) | | | | | | GGATACAGCAACTATT | GGAUACAGCAACUAUU |
| | | | | | | | TTATCAA | UUAUCAA |
| | | | | | | | [SEQ ID NO: 879] | [SEQ ID NO: 1407] |
| TTGTACCACAAC | UUGUACCACAAC | TTCAGACTTTTC | UUCAGACUUUUC | UUCAGACUUUGU | -1.52769 | 1160 | ACCGGACATACTTGTT | ACCGGACAUACUUGUU |
| AAAGTCTGAA | AAAGUCUGAA | TGTGGTACAT | UGUGGUACAU | UGUGGUAC | | | CCACTCTTGTACCACA | CCACUCUUGUACCACA |
| [SEQ ID | [SEQ ID | [SEQ ID | [SEQ ID | [SEQ ID | | | ACAAAGTCTGAATAGT | ACAAAGUCUGAAUAGU |
| NO: 650] | NO: 1178] | NO: 764] | NO: 1292] | NO: 996] | | | GAAATATATATTAAAT | GAAAUAUAUAUUAAAU |
| | | | | | | | TCAGACTTTTCTGTGG | UCAGACUUUUCUGUGG |
| | | | | | | | TACATTAGTGTGACAG | UACAUUAGUGUGACAG |
| | | | | | | | GGATACAGCAACTATT | GGAUACAGCAACUAUU |
| | | | | | | | TTATCAA | UUAUCAA |
| | | | | | | | [SEQ ID NO: 880] | [SEQ ID NO: 1408] |
| ACTGTACCACAA | ACUGUACCACAA | TCAGACTTTGCC | UCAGACUUUGCC | UCAGACUUUGUU | -3.46564 | 1161 | ACCGGACATACTTGTT | ACCGGACAUACUUGUU |
| CAAAGTCTGA | CAAAGUCUGA | GTGGTACAGA | GUGGUACAGA | GUGGUACA | | | CCACTCACTGTACCAC | CCACUCACUGUACCAC |
| [SEQ ID | [SEQ ID | [SEQ ID | [SEQ ID | [SEQ ID | | | AACAAAGTCTGATAGT | AACAAAGUCUGAUAGU |
| NO: 651] | NO: 1179] | NO: 765] | NO: 1293] | NO: 997] | | | GAAATATATATTAAAT | GAAAUAUAUAUUAAAU |
| | | | | | | | CAGACTTTGCCGTGGT | CAGACUUUGCCGUGGU |
| | | | | | | | ACAGATAGTGTGACAG | ACAGAUAGUGUGACAG |
| | | | | | | | GGATACAGCAACTATT | GGAUACAGCAACUAUU |
| | | | | | | | TTATCAA | UUAUCAA |
| | | | | | | | [SEQ ID NO: 881] | [SEQ ID NO: 1409] |
| AACTGTACCACA | AACUGUACCACA | CAGACTTTGTCT | CAGACUUUGUCU | CAGACUUUGUUG | -3.89476 | 1162 | ACCGGACATACTTGTT | ACCGGACAUACUUGUU |
| ACAAAGTCTG | ACAAAGUCUG | TGGTACAGTA | UGGUACAGUA | UGGUACAG | | | CCACTCAACTGTACCA | CCACUCAACUGUACCA |
| [SEQ ID | [SEQ ID | [SEQ ID | [SEQ ID | [SEQ ID | | | CAACAAAGTCTGTAGT | CAACAAAGUCUGUAGU |
| NO: 652] | NO: 1180] | NO: 766] | NO: 1294] | NO: 998] | | | GAAATATATATTAAAC | GAAAUAUAUAUUAAAC |
| | | | | | | | AGACTTTGTCTTGGTA | AGACUUUGUCUUGGUA |
| | | | | | | | CAGTATAGTGTGACAG | CAGUAUAGUGUGACAG |
| | | | | | | | GGATACAGCAACTATT | GGAUACAGCAACUAUU |
| | | | | | | | TTATCAA | UUAUCAA |
| | | | | | | | [SEQ ID NO: 882] | [SEQ ID NO: 1410] |
| AAACTGTACCAC | AAACUGUACCAC | AGACTTTGTTTC | AGACUUUGUUUC | AGACUUUGUUGU | -2.62277 | 1163 | ACCGGACATACTTGTT | ACCGGACAUACUUGUU |
| AACAAAGTCT | AACAAAGUCU | GGTACAGTTA | GGUACAGUUA | GGUACAGU | | | CCACTCAAACTGTACC | CCACUCAAACUGUACC |
| [SEQ ID | [SEQ ID | [SEQ ID | [SEQ ID | [SEQ ID | | | ACAACAAAGTCTTAGT | ACAACAAAGUCUUAGU |
| NO: 653] | NO: 1181] | NO: 767] | NO: 1295 | NO: 999] | | | GAAATATATATTAAAA | GAAAUAUAUAUUAAAA |
| | | | | | | | GACTTTGTTTCGGTAC | GACUUUGUUUCGGUAC |
| | | | | | | | AGTTATAGTGTGACAG | AGUUAUAGUGUGACAG |
| | | | | | | | GGATACAGCAACTATT | GGAUACAGCAACUAUU |
| | | | | | | | TTATCAA | UUAUCAA |
| | | | | | | | [SEQ ID NO: 883] | [SEQ ID NO: 1411] |
| TTAAACTGTACC | UUAAACUGUACC | ACTTTGTTGTTT | ACUUUGUUGUUU | ACUUUGUUGUGG | -0.49686 | 1165 | ACCGGACATACTTGTT | ACCGGACAUACUUGUU |
| ACAACAAAGT | ACAACAAAGU | TACAGTTTAT | UACAGUUUAU | UACAGUUU | | | CCACTCTTAAACTGTA | CCACUCUUAAACUGUA |
| [SEQ ID | [SEQ ID | [SEQ ID | [SEQ ID | [SEQ ID | | | CCACAACAAAGTTAGT | CCACAACAAAGUUAGU |
| NO: 654] | NO: 1182] | NO: 768] | NO: 1296] | NO: 1000] | | | GAAATATATATTAAAA | GAAAUAUAUAUUAAAA |
| | (same as | | | | | | CTTTGTTGTTTTACAG | CUUUGUUGUUUUACAG |
| | guide in XD- | | | | | | TTTATTAGTGTGACAG | UUUAUUAGUGUGACAG |
| | 14757) | | | | | | GGATACAGCAACTATT | GGAUACAGCAACUAUU |
| | | | | | | | TTATCAA | UUAUCAA |
| | | | | | | | [SEQ ID NO: 884] | [SEQ ID NO: 1412] |
| TTGCTAACTGGT | UUGCUAACUGGU | GCAAGGGCAAGA | GCAAGGGCAAGA | GCAAGGGCAAAC | -3.48781 | 1479 | ACCGGACATACTTGTT | ACCGGACAUACUUGUU |
| TTGCCCTTGC | UUGCCCUUGC | CAGTTAGCAT | CAGUUAGCAU | CAGUUAGC | | | CCACTCTTGCTAACTG | CCACUCUUGCUAACUG |
| [SEQ ID | [SEQ ID | [SEQ ID | [SEQ ID | [SEQ ID | | | GTTTGCCCTTGCTAGT | GUUUGCCCUUGCUAGU |
| NO: 655] | NO: 1183] | NO: 769] | NO: 1297] | NO: 1001] | | | GAAATATATATTAAAG | GAAAUAUAUAUUAAAG |
| | | | | | | | CAAGGGCAAGACAGTT | CAAGGGCAAGACAGUU |
| | | | | | | | AGCATTAGTGTGACAG | AGCAUUAGUGUGACAG |
| | | | | | | | GGATACAGCAACTATT | GGAUACAGCAACUAUU |
| | | | | | | | TTATCAA | UUAUCAA |
| | | | | | | | [SEQ ID NO: 885] | [SEQ ID NO: 1413] |
| TGGGTTGAAATC | UGGGUUGAAAUC | TCACACTTCATG | UCACACUUCAUG | UCACACUUCAGA | -1.9344 | 1754 | ACCGGACATACTTGTT | ACCGGACAUACUUGUU |
| TGAAGTGTGA | UGAAGUGUGA | TTTCAACCCT | UUUCAACCCU | UUUCAACC | | | CCACTCTGGGTTGAAA | CCACUCUGGGUUGAAA |
| [SEQ ID | [SEQ ID | [SEQ ID | [SEQ ID | [SEQ ID | | | TCTGAAGTGTGATAGT | UCUGAAGUGUGAUAGU |
| NO: 656] | NO: 1184] | NO: 770] | NO: 1298] | NO: 1002] | | | GAAATATATATTAAAT | GAAAUAUAUAUUAAAU |
| | | | | | | | CACACTTCATGTTTCA | CACACUUCAUGUUUCA |
| | | | | | | | ACCCTTAGTGTGACAG | ACCCUUAGUGUGACAG |
| | | | | | | | GGATACAGCAACTATT | GGAUACAGCAACUAUU |
| | | | | | | | TTATCAA | UUAUCAA |
| | | | | | | | [SEQ ID NO: 886] | [SEQ ID NO: 1414] |
| TCGGGTTGAAAT | UCGGGUUGAAAU | CACACTTCAGGC | CACACUUCAGGC | CACACUUCAGAU | -4.71279 | 1755 | ACCGGACATACTTGTT | ACCGGACAUACUUGUU |
| CTGAAGTGTG | CUGAAGUGUG | TTCAACCCGT | UUCAACCCGU | UUCAACCC | | | CCACTCTCGGGTTGAA | CCACUCUCGGGUUGAA |
| [SEQ ID | [SEQ ID | [SEQ ID | [SEQ ID | [SEQ ID | | | ATCTGAAGTGTGTAGT | AUCUGAAGUGUGUAGU |
| NO: 657] | NO: 1185] | NO: 771] | NO: 1299] | NO: 1003] | | | GAAATATATATTAAAC | GAAAUAUAUAUUAAAC |
| | | | | | | | ACACTTCAGGCTTCAA | ACACUUCAGGCUUCAA |
| | | | | | | | CCCGTTAGTGTGACAG | CCCGUUAGUGUGACAG |
| | | | | | | | GGATACAGCAACTATT | GGAUACAGCAACUAUU |
| | | | | | | | TTATCAA | UUAUCAA |
| | | | | | | | [SEQ ID NO: 887] | [SEQ ID NO: 1415] |
| TTCGGGTTGAAA | UUCGGGUUGAAA | ACACTTCAGACC | ACACUUCAGACC | ACACUUCAGAUU | -3.7055 | 1756 | ACCGGACATACTTGTT | ACCGGACAUACUUGUU |
| TCTGAAGTGT | UCUGAAGUGU | TCAACCCGAT | UCAACCCGAU | UCAACCCG | | | CCACTCTTCGGGTTGA | CCACUCUUCGGGUUGA |
| [SEQ ID | [SEQ ID | [SEQ ID | [SEQ ID | [SEQ ID | | | AATCTGAAGTGTTAGT | AAUCUGAAGUGUUAGU |
| NO: 607] | NO: 108] | NO: 772] | NO: 1300] | NO: 1004] | | | GAAATATATATTAAAA | GAAAUAUAUAUUAAAA |
| | (same as | | | | | | CACTTCAGACCTCAAC | CACUUCAGACCUCAAC |
| | guide in XD- | | | | | | CCGATTAGTGTGACAG | CCGAUUAGUGUGACAG |
| | 14790) | | | | | | GGATACAGCAACTATT | GGAUACAGCAACUAUU |
| | | | | | | | TTATCAA | UUAUCAA |
| | | | | | | | [SEQ ID NO: 888] | [SEQ ID NO: 1416] |
| TGATGCAGGACT | UGAUGCAGGACU | TACGCCTGCTGT | UACGCCUGCUGU | UACGCCUGCUAG | -1.91676 | 2351 | ACCGGACATACTTGTT | ACCGGACAUACUUGUU |
| AGCAGGCGTA | AGCAGGCGUA | TCCTGCATCT | UCCUGCAUCU | UCCUGCAU | | | CCACTCTGATGCAGGA | CCACUCUGAUGCAGGA |
| [SEQ ID | [SEQ ID | [SEQ ID | [SEQ ID | [SEQ ID | | | CTAGCAGGCGTATAGT | CUAGCAGGCGUAUAGU |
| NO: 658] | NO: 1186] | NO: 773] | NO: 1301] | NO: 1005] | | | GAAATATATATTAAAT | GAAAUAUAUAUUAAAU |
| | | | | | | | ACGCCTGCTGTTCCTG | ACGCCUGCUGUUCCUG |
| | | | | | | | CATCTTAGTGTGACAG | CAUCUUAGUGUGACAG |
| | | | | | | | GGATACAGCAACTATT | GGAUACAGCAACUAUU |
| | | | | | | | TTATCAA | UUAUCAA |
| | | | | | | | [SEQ ID NO: 889] | [SEQ ID NO: 1417] |
| TCGATGCAGGAC | UCGAUGCAGGAC | ACGCCTGCTATC | ACGCCUGCUAUC | ACGCCUGCUAGU | -2.27165 | 2352 | ACCGGACATACTTGTT | ACCGGACAUACUUGUU |
| TAGCAGGCGT | UAGCAGGCGU | CCTGCATCGT | CCUGCAUCGU | CCUGCAUC | | | CCACTCTCGATGCAGG | CCACUCUCGAUGCAGG |
| [SEQ ID | [SEQ ID | [SEQ ID | [SEQ ID | [SEQ ID | | | ACTAGCAGGCGTTAGT | ACUAGCAGGCGUUAGU |
| NO: 659] | NO: 1187] | NO: 774] | NO: 1302] | NO: 1006] | | | GAAATATATATTAAAA | GAAAUAUAUAUUAAAA |
| | | | | | | | CGCCTGCTATCCCTGC | CGCCUGCUAUCCCUGC |
| | | | | | | | ATCGTTAGTGTGACAG | AUCGUUAGUGUGACAG |
| | | | | | | | GGATACAGCAACTATT | GGAUACAGCAACUAUU |
| | | | | | | | TTATCAA | UUAUCAA |
| | | | | | | | [SEQ ID NO: 890] | [SEQ ID NO: 1418] |
| TTCGATGCAGGA | UUCGAUGCAGGA | CGCCTGCTAGCA | CGCCUGCUAGCA | CGCCUGCUAGUC | -4.78943 | 2353 | ACCGGACATACTTGTT | ACCGGACAUACUUGUU |
| CTAGCAGGCG | CUAGCAGGCG | CTGCATCGAT | CUGCAUCGAU | CUGCAUCG | | | CCACTCTTCGATGCAG | CCACUCUUCGAUGCAG |
| [SEQ ID | [SEQ ID | [SEQ ID | [SEQ ID | [SEQ ID | | | GACTAGCAGGCGTAGT | GACUAGCAGGCGUAGU |
| NO: 612] | NO: 166] | NO: 775] | NO: 1303] | NO: 1007] | | | GAAATATATATTAAAC | GAAAUAUAUAUUAAAC |
| | (same as | | | | | | GCCTGCTAGCACTGCA | GCCUGCUAGCACUGCA |
| | guide in XD- | | | | | | TCGATTAGTGTGACAG | UCGAUUAGUGUGACAG |
| | 14819) | | | | | | GGATACAGCAACTATT | GGAUACAGCAACUAUU |
| | | | | | | | TTATCAA | UUAUCAA |
| | | | | | | | [SEQ ID NO: 891] | [SEQ ID NO: 1419] |
| TTTCGATGCAGG | UUUCGAUGCAGG | GCCTGCTAGTAA | GCCUGCUAGUAA | GCCUGCUAGUCC | -3.98959 | 2354 | ACCGGACATACTTGTT | ACCGGACAUACUUGUU |
| ACTAGCAGGC | ACUAGCAGGC | TGCATCGAAT | UGCAUCGAAU | UGCAUCGA | | | CCACTCTTTCGATGCA | CCACUCUUUCGAUGCA |
| [SEQ ID | [SEQ ID | [SEQ ID | [SEQ ID | [SEQ ID | | | GGACTAGCAGGCTAGT | GGACUAGCAGGCUAGU |
| NO: 660] | NO: 1188] | NO: 776] | NO: 1304] | NO: 1008] | | | GAAATATATATTAAAG | GAAAUAUAUAUUAAAG |
| | | | | | | | CCTGCTAGTAATGCAT | CCUGCUAGUAAUGCAU |
| | | | | | | | CGAATTAGTGTGACAG | CGAAUUAGUGUGACAG |
| | | | | | | | GGATACAGCAACTATT | GGAUACAGCAACUAUU |
| | | | | | | | TTATCAA | UUAUCAA |
| | | | | | | | [SEQ ID NO: 892] | [SEQ ID NO: 1420] |
| TGTTCGATGCAG | UGUUCGAUGCAG | CCTGCTAGTCAC | CCUGCUAGUCAC | CCUGCUAGUCCU | -3.78415 | 2355 | ACCGGACATACTTGTT | ACCGGACAUACUUGUU |
| GACTAGCAGG | GACUAGCAGG | GCATCGAACT | GCAUCGAACU | GCAUCGAA | | | CCACTCTGTTCGATGC | CCACUCUGUUCGAUGC |
| [SEQ ID | [SEQ ID | [SEQ ID | [SEQ ID | [SEQ ID | | | AGGACTAGCAGGTAGT | AGGACUAGCAGGUAGU |
| NO: 661] | NO: 1189] | NO: 777] | NO: 1305] | NO: 1009] | | | GAAATATATATTAAAC | GAAAUAUAUAUUAAAC |
| | (same as | | | | | | CTGCTAGTCACGCATC | CUGCUAGUCACGCAUC |
| | guide in XD- | | | | | | GAACTTAGTGTGACAG | GAACUUAGUGUGACAG |
| | 14820) | | | | | | GGATACAGCAACTATT | GGAUACAGCAACUAUU |
| | | | | | | | TTATCAA | UUAUCAA |
| | | | | | | | [SEQ ID NO: 893] | [SEQ ID NO: 1421] |
| TTGTTCGATGCA | UUGUUCGAUGCA | CTGCTAGTCCCT | CUGCUAGUCCCU | CUGCUAGUCCUG | -2.10173 | 2356 | ACCGGACATACTTGTT | ACCGGACAUACUUGUU |
| GGACTAGCAG | GGACUAGCAG | CATCGAACAT | CAUCGAACAU | CAUCGAAC | | | CCACTCTTGTTCGATG | CCACUCUUGUUCGAUG |
| [SEQ ID | [SEQ ID | [SEQ ID | [SEQ ID | [SEQ ID | | | CAGGACTAGCAGTAGT | CAGGACUAGCAGUAGU |
| NO: 662] | NO: 1190] | NO: 778] | NO: 1306] | NO: 1010] | | | GAAATATATATTAAAC | GAAAUAUAUAUUAAAC |
| | | | | | | | TGCTAGTCCCTCATCG | UGCUAGUCCCUCAUCG |
| | | | | | | | AACATTAGTGTGACAG | AACAUUAGUGUGACAG |
| | | | | | | | GGATACAGCAACTATT | GGAUACAGCAACUAUU |
| | | | | | | | TTATCAA | UUAUCAA |
| | | | | | | | [SEQ ID NO: 894] | [SEQ ID NO: 1422] |
| TCTGTTCGATGC | UCUGUUCGAUGC | TGCTAGTCCTTA | UGCUAGUCCUUA | UGCUAGUCCUGC | -1.98657 | 2357 | ACCGGACATACTTGTT | ACCGGACAUACUUGUU |
| AGGACTAGCA | AGGACUAGCA | ATCGAACAGT | AUCGAACAGU | AUCGAACA | | | CCACTCTCTGTTCGAT | CCACUCUCUGUUCGAU |
| [SEQ ID | [SEQ ID | [SEQ ID | [SEQ ID | [SEQ ID | | | GCAGGACTAGCATAGT | GCAGGACUAGCAUAGU |
| NO: 663] | NO: 1191] | NO: 779] | NO: 1307] | NO: 1011] | | | GAAATATATATTAAAT | GAAAUAUAUAUUAAAU |
| | | | | | | | GCTAGTCCTTAATCGA | GCUAGUCCUUAAUCGA |
| | | | | | | | ACAGTTAGTGTGACAG | ACAGUUAGUGUGACAG |
| | | | | | | | GGATACAGCAACTATT | GGAUACAGCAACUAUU |
| | | | | | | | TTATCAA | UUAUCAA |
| | | | | | | | [SEQ ID NO: 895] | [SEQ ID NO: 1423] |
| TTCTGTTCGATG | UUCUGUUCGAUG | GCTAGTCCTGAG | GCUAGUCCUGAG | GCUAGUCCUGCA | -4.1672 | 2358 | ACCGGACATACTTGTT | ACCGGACAUACUUGUU |
| CAGGACTAGC | CAGGACUAGC | TCGAACAGAT | UCGAACAGAU | UCGAACAG | | | CCACTCTTCTGTTCGA | CCACUCUUCUGUUCGA |
| [SEQ ID | [SEQ ID | [SEQ ID | [SEQ ID | [SEQ ID | | | TGCAGGACTAGCTAGT | UGCAGGACUAGCUAGU |
| NO: 664] | NO: 1192] | NO: 780] | NO: 1308] | NO: 1012] | | | GAAATATATATTAAAG | GAAAUAUAUAUUAAAG |
| | | | | | | | CTAGTCCTGAGTCGAA | CUAGUCCUGAGUCGAA |
| | | | | | | | CAGATTAGTGTGACAG | CAGAUUAGUGUGACAG |
| | | | | | | | GGATACAGCAACTATT | GGAUACAGCAACUAUU |
| | | | | | | | TTATCAA | UUAUCAA |
| | | | | | | | [SEQ ID NO: 896] | [SEQ ID NO: 1424] |
| TCTCTGTTCGAT | UCUCUGUUCGAU | CTAGTCCTGCGC | CUAGUCCUGCGC | CUAGUCCUGCAU | -1.7173 | 2359 | ACCGGACATACTTGTT | ACCGGACAUACUUGUU |
| GCAGGACTAG | GCAGGACUAG | CGAACAGAGT | CGAACAGAGU | CGAACAGA | | | CCACTCTCTCTGTTCG | CCACUCUCUCUGUUCG |
| [SEQ ID | [SEQ ID | [SEQ ID | [SEQ ID | [SEQ ID | | | ATGCAGGACTAGTAGT | AUGCAGGACUAGUAGU |
| NO: 665] | NO: 1193] | NO: 781] | NO: 1309] | NO: 1013] | | | GAAATATATATTAAAC | GAAAUAUAUAUUAAAC |
| | | | | | | | TAGTCCTGCGCCGAAC | UAGUCCUGCGCCGAAC |
| | | | | | | | AGAGTTAGTGTGACAG | AGAGUUAGUGUGACAG |
| | | | | | | | GGATACAGCAACTATT | GGAUACAGCAACUAUU |
| | | | | | | | TTATCAA | UUAUCAA |
| | | | | | | | [SEQ ID NO: 897] | [SEQ ID NO: 1425] |
| TGAGAGAAGGAA | UGAGAGAAGGAA | TCAACCCACGCC | UCAACCCACGCC | UCAACCCACGUU | -0.42433 | 2926 | ACCGGACATACTTGTT | ACCGGACAUACUUGUU |
| CGTGGGTTGA | CGUGGGUUGA | CCTTCTCTCT | CCUUCUCUCU | CCUUCUCU | | | CCACTCTGAGAGAAGG | CCACUCUGAGAGAAGG |
| [SEQ ID | [SEQ ID | [SEQ ID | [ SEQ ID | [SEQ ID | | | AACGTGGGTTGATAGT | AACGUGGGUUGAUAGU |
| NO: 666] | NO: 1194] | NO: 782] | NO: 1310] | NO: 1014] | | | GAAATATATATTAAAT | GAAAUAUAUAUUAAAU |
| | | | | | | | CAACCCACGCCCCTTC | CAACCCACGCCCCUUC |
| | | | | | | | TCTCTTAGTGTGACAG | UCUCUUAGUGUGACAG |
| | | | | | | | GGATACAGCAACTATT | GGAUACAGCAACUAUU |
| | | | | | | | TTATCAA | UUAUCAA |
| | | | | | | | [SEQ ID NO: 898] | [SEQ ID NO: 1426] |
| TTGAGAGAAGGA | UUGAGAGAAGGA | CAACCCACGTCA | CAACCCACGUCA | CAACCCACGUUC | -3.38604 | 2927 | ACCGGACATACTTGTT | ACCGGACAUACUUGUU |
| ACGTGGGTTG | ACGUGGGUUG | CTTCTCTCAT | CUUCUCUCAU | CUUCUCUC | | | CCACTCTTGAGAGAAG | CCACUCUUGAGAGAAG |
| [SEQ ID | [SEQ ID | [SEQ ID | [SEQ ID | [SEQ ID | | | GAACGTGGGTTGTAGT | GAACGUGGGUUGUAGU |
| NO: 667] | NO: 1195] | NO: 783] | NO: 1311] | NO: 1015] | | | GAAATATATATTAAAC | GAAAUAUAUAUUAAAC |
| | | | | | | | AACCCACGTCACTTCT | AACCCACGUCACUUCU |
| | | | | | | | CTCATTAGTGTGACAG | CUCAUUAGUGUGACAG |
| | | | | | | | GGATACAGCAACTATT | GGAUACAGCAACUAUU |
| | | | | | | | TTATCAA | UUAUCAA |
| | | | | | | | [SEQ ID NO: 899] | [SEQ ID NO: 1427] |
| TCTGAGAGAAGG | UCUGAGAGAAGG | AACCCACGTTAA | AACCCACGUUAA | AACCCACGUUCC | -3.5546 | 2928 | ACCGGACATACTTGTT | ACCGGACAUACUUGUU |
| AACGTGGGTT | AACGUGGGUU | TTCTCTCAGT | UUCUCUCAGU | UUCUCUCA | | | CCACTCTCTGAGAGAA | CCACUCUCUGAGAGAA |
| [SEQ ID | [SEQ ID | [SEQ ID | [SEQ ID | [SEQ ID | | | GGAACGTGGGTTTAGT | GGAACGUGGGUUUAGU |
| NO: 668] | NO: 1196] | NO: 784] | NO: 1312] | NO: 1016] | | | GAAATATATATTAAAA | GAAAUAUAUAUUAAAA |
| | | | | | | | ACCCACGTTAATTCTC | ACCCACGUUAAUUCUC |
| | | | | | | | TCAGTTAGTGTGACAG | UCAGUUAGUGUGACAG |
| | | | | | | | GGATACAGCAACTATT | GGAUACAGCAACUAUU |
| | | | | | | | TTATCAA | UUAUCAA |
| | | | | | | | [SEQ ID NO: 900] | [SEQ ID NO: 1428] |
| TGCTGAGAGAAG | UGCUGAGAGAAG | ACCCACGTTCAC | ACCCACGUUCAC | ACCCACGUUCCU | -2.96935 | 2929 | ACCGGACATACTTGTT | ACCGGACAUACUUGUU |
| GAACGTGGGT | GAACGUGGGU | TCTCTCAGCT | UCUCUCAGCU | UCUCUCAG | | | CCACTCTGCTGAGAGA | CCACUCUGCUGAGAGA |
| [SEQ ID | [SEQ ID | [SEQ ID | [SEQ ID | [SEQ ID | | | AGGAACGTGGGTTAGT | AGGAACGUGGGUUAGU |
| NO: 669] | NO: 1197] | NO: 785] | NO: 1313] | NO: 1017] | | | GAAATATATATTAAAA | GAAAUAUAUAUUAAAA |
| | | | | | | | CCCACGTTCACTCTCT | CCCACGUUCACUCUCU |
| | | | | | | | CAGCTTAGTGTGACAG | CAGCUUAGUGUGACAG |
| | | | | | | | GGATACAGCAACTATT | GGAUACAGCAACUAUU |
| | | | | | | | TTATCAA | UUAUCAA |
| | | | | | | | [SEQ ID NO: 901] | [SEQ ID NO: 1429] |
| TGGCTGAGAGAA | UGGCUGAGAGAA | CCCACGTTCCCC | CCCACGUUCCCC | CCCACGUUCCUU | -1.84629 | 2930 | ACCGGACATACTTGTT | ACCGGACAUACUUGUU |
| GGAACGTGGG | GGAACGUGGG | CTCTCAGCCT | CUCUCAGCCU | CUCUCAGC | | | CCACTCTGGCTGAGAG | CCACUCUGGCUGAGAG |
| [SEQ ID | [SEQ ID | [SEQ ID | [SEQ ID | [SEQ ID | | | AAGGAACGTGGGTAGT | AAGGAACGUGGGUAGU |
| NO: 670] | NO: 1198] | NO: 786] | NO: 1314] | NO: 1018] | | | GAAATATATATTAAAC | GAAAUAUAUAUUAAAC |
| | | | | | | | CCACGTTCCCCCTCTC | CCACGUUCCCCCUCUC |
| | | | | | | | AGCCTTAGTGTGACAG | AGCCUUAGUGUGACAG |
| | | | | | | | GGATACAGCAACTATT | GGAUACAGCAACUAUU |
| | | | | | | | TTATCAA | UUAUCAA |
| | | | | | | | [SEQ ID NO: 902] | [SEQ ID NO: 1430] |
| TTGGCTGAGAGA | UUGGCUGAGAGA | CCACGTTCCTCA | CCACGUUCCUCA | CCACGUUCCUUC | -4.19621 | 2931 | ACCGGACATACTTGTT | ACCGGACAUACUUGUU |
| AGGAACGTGG | AGGAACGUGG | TCTCAGCCAT | UCUCAGCCAU | UCUCAGCC | | | CCACTCTTGGCTGAGA | CCACUCUUGGCUGAGA |
| [SEQ ID | [SEQ ID | [SEQ ID | [SEQ ID | [SEQ ID | | | GAAGGAACGTGGTAGT | GAAGGAACGUGGUAGU |
| NO: 671] | NO: 1199] | NO: 787] | NO: 1315] | NO: 1019] | | | GAAATATATATTAAAC | GAAAUAUAUAUUAAAC |
| | | | | | | | CACGTTCCTCATCTCA | CACGUUCCUCAUCUCA |
| | | | | | | | GCCATTAGTGTGACAG | GCCAUUAGUGUGACAG |
| | | | | | | | GGATACAGCAACTATT | GGAUACAGCAACUAUU |
| | | | | | | | TTATCAA | UUAUCAA |
| | | | | | | | [SEQ ID NO: 903] | [SEQ ID NO: 1431] |
| TTTGGCTGAGAG | UUUGGCUGAGAG | CACGTTCCTTAC | CACGUUCCUUAC | CACGUUCCUUCU | -3.26413 | 2932 | ACCGGACATACTTGTT | ACCGGACAUACUUGUU |
| AAGGAACGTG | AAGGAACGUG | CTCAGCCAAT | CUCAGCCAAU | CUCAGCCA | | | CCACTCTTTGGCTGAG | CCACUCUUUGGCUGAG |
| [SEQ ID | [SEQ ID | [SEQ ID | [SEQ ID | [SEQ ID | | | AGAAGGAACGTGTAGT | AGAAGGAACGUGUAGU |
| NO: 672] | NO: 1200] | NO: 788] | NO: 1316] | NO: 1020] | | | GAAATATATATTAAAC | GAAAUAUAUAUUAAAC |
| | | | | | | | ACGTTCCTTACCTCAG | ACGUUCCUUACCUCAG |
| | | | | | | | CCAATTAGTGTGACAG | CCAAUUAGUGUGACAG |
| | | | | | | | GGATACAGCAACTATT | GGAUACAGCAACUAUU |
| | | | | | | | TTATCAA | UUAUCAA |
| | | | | | | | [SEQ ID NO: 904] | [SEQ ID NO: 1432] |
| TTTTGGCTGAGA | UUUUGGCUGAGA | ACGTTCCTTCCA | ACGUUCCUUCCA | ACGUUCCUUCUC | -0.25972 | 2933 | ACCGGACATACTTGTT | ACCGGACAUACUUGUU |
| GAAGGAACGT | GAAGGAACGU | TCAGCCAAAT | UCAGCCAAAU | UCAGCCAA | | | CCACTCTTTTGGCTGA | CCACUCUUUUGGCUGA |
| [SEQ ID | [SEQ ID | [SEQ ID | [SEQ ID | [SEQ ID | | | GAGAAGGAACGTTAGT | GAGAAGGAACGUUAGU |
| NO: 673] | NO: 1201] | NO: 789] | NO: 1317] | NO: 1021] | | | GAAATATATATTAAAA | GAAAUAUAUAUUAAAA |
| | | | | | | | CGTTCCTTCCATCAGC | CGUUCCUUCCAUCAGC |
| | | | | | | | CAAATTAGTGTGACAG | CAAAUUAGUGUGACAG |
| | | | | | | | GGATACAGCAACTATT | GGAUACAGCAACUAUU |
| | | | | | | | TTATCAA | UUAUCAA |
| | | | | | | | [SEQ ID NO: 905] | [SEQ ID NO: 1433] |
| TCTTTGGCTGAG | UCUUUGGCUGAG | CGTTCCTTCTAC | CGUUCCUUCUAC | CGUUCCUUCUCU | -0.75797 | 2934 | ACCGGACATACTTGTT | ACCGGACAUACUUGUU |
| AGAAGGAACG | AGAAGGAACG | CAGCCAAAGT | CAGCCAAAGU | CAGCCAAA | | | CCACTCTCTTTGGCTG | CCACUCUCUUUGGCUG |
| [SEQ ID | [SEQ ID | [SEQ ID | [SEQ ID | [SEQ ID | | | AGAGAAGGAACGTAGT | AGAGAAGGAACGUAGU |
| NO: 674] | NO: 1202] | NO: 790] | NO: 1318] | NO: 1022] | | | GAAATATATATTAAAC | GAAAUAUAUAUUAAAC |
| | | | | | | | GTTCCTTCTACCAGCC | GUUCCUUCUACCAGCC |
| | | | | | | | AAAGTTAGTGTGACAG | AAAGUUAGUGUGACAG |
| | | | | | | | GGATACAGCAACTATT | GGAUACAGCAACUAUU |
| | | | | | | | TTATCAA | UUAUCAA |
| | | | | | | | [SEQ ID NO: 906] | [SEQ ID NO: 1434] |
| TGCTTTGGCTGA | UGCUUUGGCUGA | GTTCCTTCTCCA | GUUCCUUCUCCA | GUUCCUUCUCUC | -1.45481 | 2935 | ACCGGACATACTTGTT | ACCGGACAUACUUGUU |
| GAGAAGGAAC | GAGAAGGAAC | AGCCAAAGCT | AGCCAAAGCU | AGCCAAAG | | | CCACTCTGCTTTGGCT | CCACUCUGCUUUGGCU |
| [SEQ ID | [SEQ ID | [SEQ ID | [SEQ ID | [SEQ ID | | | GAGAGAAGGAACTAGT | GAGAGAAGGAACUAGU |
| NO: 675] | NO: 1203] | NO: 791] | NO: 1319] | NO: 1023] | | | GAAATATATATTAAAG | GAAAUAUAUAUUAAAG |
| | | | | | | | TTCCTTCTCCAAGCCA | UUCCUUCUCCAAGCCA |
| | | | | | | | AAGCTTAGTGTGACAG | AAGCUUAGUGUGACAG |
| | | | | | | | GGATACAGCAACTATT | GGAUACAGCAACUAUU |
| | | | | | | | TTATCAA | UUAUCAA |
| | | | | | | | [SEQ ID NO: 907] | [SEQ ID NO: 1435] |
| AGGCTTTGGCTG | AGGCUUUGGCUG | TTCCTTCTCTAG | UUCCUUCUCUAG | UUCCUUCUCUCA | -0.85197 | 2936 | ACCGGACATACTTGTT | ACCGGACAUACUUGUU |
| AGAGAAGGAA | AGAGAAGGAA | GCCAAAGCCA | GCCAAAGCCA | GCCAAAGC | | | CCACTCAGGCTTTGGC | CCACUCAGGCUUUGGC |
| [SEQ ID | [SEQ ID | [SEQ ID | [SEQ ID | [SEQ ID | | | TGAGAGAAGGAATAGT | UGAGAGAAGGAAUAGU |
| NO: 676] | NO: 1204] | NO: 792] | NO: 1320] | NO: 1024] | | | GAAATATATATTAAAT | GAAAUAUAUAUUAAAU |
| | | | | | | | TCCTTCTCTAGGCCAA | UCCUUCUCUAGGCCAA |
| | | | | | | | AGCCATAGTGTGACAG | AGCCAUAGUGUGACAG |
| | | | | | | | GGATACAGCAACTATT | GGAUACAGCAACUAUU |
| | | | | | | | TTATCAA | UUAUCAA |
| | | | | | | | [SEQ ID NO: 908] | [SEQ ID NO: 1436] |
| AAGGCTTTGGCT | AAGGCUUUGGCU | TCCTTCTCTCGT | UCCUUCUCUCGU | UCCUUCUCUCAG | -3.87114 | 2937 | ACCGGACATACTTGTT | ACCGGACAUACUUGUU |
| GAGAGAAGGA | GAGAGAAGGA | CCAAAGCCTA | CCAAAGCCUA | CCAAAGCC | | | CCACTCAAGGCTTTGG | CCACUCAAGGCUUUGG |
| [SEQ ID | [SEQ ID | [SEQ ID | [SEQ ID | [SEQ ID | | | CTGAGAGAAGGATAGT | CUGAGAGAAGGAUAGU |
| NO: 677] | NO: 1205] | NO: 793] | NO: 1321] | NO: 1025] | | | GAAATATATATTAAAT | GAAAUAUAUAUUAAAU |
| | | | | | | | CCTTCTCTCGTCCAAA | CCUUCUCUCGUCCAAA |
| | | | | | | | GCCTATAGTGTGACAG | GCCUAUAGUGUGACAG |
| | | | | | | | GGATACAGCAACTATT | GGAUACAGCAACUAUU |
| | | | | | | | TTATCAA | UUAUCAA |
| | | | | | | | [SEQ ID NO: 909] | [SEQ ID NO: 1437] |
| TAAGGCTTTGGC | UAAGGCUUUGGC | CCTTCTCTCATA | CCUUCUCUCAUA | CCUUCUCUCAGC | -0.34984 | 2938 | ACCGGACATACTTGTT | ACCGGACAUACUUGUU |
| TGAGAGAAGG | UGAGAGAAGG | CAAAGCCTTT | CAAAGCCUUU | CAAAGCCU | | | CCACTCTAAGGCTTTG | CCACUCUAAGGCUUUG |
| [SEQ ID | [SEQ ID | [SEQ ID | [SEQ ID | [SEQ ID | | | GCTGAGAGAAGGTAGT | GCUGAGAGAAGGUAGU |
| NO: 678] | NO: 1206] | NO: 794] | NO: 1322] | NO: 1026] | | | GAAATATATATTAAAC | GAAAUAUAUAUUAAAC |
| | | | | | | | CTTCTCTCATACAAAG | CUUCUCUCAUACAAAG |
| | | | | | | | CCTTTTAGTGTGACAG | CCUUUUAGUGUGACAG |
| | | | | | | | GGATACAGCAACTATT | GGAUACAGCAACUAUU |
| | | | | | | | TTATCAA | UUAUCAA |
| | | | | | | | [SEQ ID NO: 910] | [SEQ ID NO: 1438] |
| AGAAGGCTTTGG | AGAAGGCUUUGG | CTTCTCTCAGAA | CUUCUCUCAGAA | CUUCUCUCAGCC | -2.37082 | 2939 | ACCGGACATACTTGTT | ACCGGACAUACUUGUU |
| CTGAGAGAAG | CUGAGAGAAG | AAAGCCTTCA | AAAGCCUUCA | AAAGCCUU | | | CCACTCAGAAGGCTTT | CCACUCAGAAGGCUUU |
| [SEQ ID | [SEQ ID | [SEQ ID | [SEQ ID | [SEQ ID | | | GGCTGAGAGAAGTAGT | GGCUGAGAGAAGUAGU |
| NO: 679] | NO: 1207] | NO: 795] | NO: 1323] | NO: 1027] | | | GAAATATATATTAAAC | GAAAUAUAUAUUAAAC |
| | | | | | | | TTCTCTCAGAAAAAGC | UUCUCUCAGAAAAAGC |
| | | | | | | | CTTCATAGTGTGACAG | CUUCAUAGUGUGACAG |
| | | | | | | | GGATACAGCAACTATT | GGAUACAGCAACUAUU |
| | | | | | | | TTATCAA | UUAUCAA |
| | | | | | | | [SEQ ID NO: 911] | [SEQ ID NO: 1439] |
| TAGAAGGCTTTG | UAGAAGGCUUUG | TTCTCTCAGCAG | UUCUCUCAGCAG | UUCUCUCAGCCA | -0.15876 | 2940 | ACCGGACATACTTGTT | ACCGGACAUACUUGUU |
| GCTGAGAGAA | GCUGAGAGAA | AAGCCTTCTT | AAGCCUUCUU | AAGCCUUC | | | CCACTCTAGAAGGCTT | CCACUCUAGAAGGCUU |
| [SEQ ID | [SEQ ID | [SEQ ID | [SEQ ID | [SEQ ID | | | TGGCTGAGAGAATAGT | UGGCUGAGAGAAUAGU |
| NO: 680] | NO: 1208] | NO: 796] | NO: 1324] | NO: 1028] | | | GAAATATATATTAAAT | GAAAUAUAUAUUAAAU |
| | | | | | | | TCTCTCAGCAGAAGCC | UCUCUCAGCAGAAGCC |
| | | | | | | | TTCTTTAGTGTGACAG | UUCUUUAGUGUGACAG |
| | | | | | | | GGATACAGCAACTATT | GGAUACAGCAACUAUU |
| | | | | | | | TTATCAA | UUAUCAA |
| | | | | | | | [SEQ ID NO: 912] | [SEQ ID NO: 1440] |
| TTAGAAGGCTTT | UUAGAAGGCUUU | TCTCTCAGCCGG | UCUCUCAGCCGG | UCUCUCAGCCAA | -0.48849 | 2941 | ACCGGACATACTTGTT | ACCGGACAUACUUGUU |
| GGCTGAGAGA | GGCUGAGAGA | AGCCTTCTAT | AGCCUUCUAU | AGCCUUCU | | | CCACTCTTAGAAGGCT | CCACUCUUAGAAGGCU |
| [SEQ ID | [SEQ ID | [SEQ ID | [SEQ ID | [SEQ ID | | | TTGGCTGAGAGATAGT | UUGGCUGAGAGAUAGU |
| NO: 681] | NO: 1209] | NO: 797] | NO: 1325] | NO: 1029] | | | GAAATATATATTAAAT | GAAAUAUAUAUUAAAU |
| | (same as | | | | | | CTCTCAGCCGGAGCCT | CUCUCAGCCGGAGCCU |
| | guide in XD- | | | | | | TCTATTAGTGTGACAG | UCUAUUAGUGUGACAG |
| | 14858) | | | | | | GGATACAGCAACTATT | GGAUACAGCAACUAUU |
| | | | | | | | TTATCAA | UUAUCAA |
| | | | | | | | [SEQ ID NO: 913] | [SEQ ID NO: 1441] |
| AGTAGAAGGCTT | AGUAGAAGGCUU | CTCTCAGCCAGG | CUCUCAGCCAGG | CUCUCAGCCAAA | -2.61597 | 2942 | ACCGGACATACTTGTT | ACCGGACAUACUUGUU |
| TGGCTGAGAG | UGGCUGAGAG | GCCTTCTACA | GCCUUCUACA | GCCUUCUA | | | CCACTCAGTAGAAGGC | CCACUCAGUAGAAGGC |
| [SEQ ID | [SEQ ID | [SEQ ID | [SEQ ID | [SEQ ID | | | TTTGGCTGAGAGTAGT | UUUGGCUGAGAGUAGU |
| NO: 682] | NO: 1210] | NO: 798] | NO: 1326] | NO: 1030] | | | GAAATATATATTAAAC | GAAAUAUAUAUUAAAC |
| | | | | | | | TCTCAGCCAGGGCCTT | UCUCAGCCAGGGCCUU |
| | | | | | | | CTACATAGTGTGACAG | CUACAUAGUGUGACAG |
| | | | | | | | GGATACAGCAACTATT | GGAUACAGCAACUAUU |
| | | | | | | | TTATCAA | UUAUCAA |
| | | | | | | | [SEQ ID NO: 914] | [SEQ ID NO: 1442] |
| TAGTAGAAGGCT | UAGUAGAAGGCU | TCTCAGCCAAGT | UCUCAGCCAAGU | UCUCAGCCAAAG | -2.42796 | 2943 | ACCGGACATACTTGTT | ACCGGACAUACUUGUU |
| TTGGCTGAGA | UUGGCUGAGA | CCTTCTACTT | CCUUCUACUU | CCUUCUAC | | | CCACTCTAGTAGAAGG | CCACUCUAGUAGAAGG |
| [SEQ ID | [SEQ ID | [SEQ ID | [SEQ ID | [SEQ ID | | | CTTTGGCTGAGATAGT | CUUUGGCUGAGAUAGU |
| NO: 683] | NO: 1211] | NO: 799] | NO: 1327] | NO: 1031] | | | GAAATATATATTAAAT | GAAAUAUAUAUUAAAU |
| | | | | | | | CTCAGCCAAGTCCTTC | CUCAGCCAAGUCCUUC |
| | | | | | | | TACTTTAGTGTGACAG | UACUUUAGUGUGACAG |
| | | | | | | | GGATACAGCAACTATT | GGAUACAGCAACUAUU |
| | | | | | | | TTATCAA | UUAUCAA |
| | | | | | | | [SEQ ID NO: 915] | [SEQ ID NO: 1443] |
| TTAGTAGAAGGC | UUAGUAGAAGGC | CTCAGCCAAATA | CUCAGCCAAAUA | CUCAGCCAAAGC | -1.95956 | 2944 | ACCGGACATACTTGTT | ACCGGACAUACUUGUU |
| TTTGGCTGAG | UUUGGCUGAG | CTTCTACTAT | CUUCUACUAU | CUUCUACU | | | CCACTCTTAGTAGAAG | CCACUCUUAGUAGAAG |
| [SEQ ID | [SEQ ID | [SEQ ID | [SEQ ID | [SEQ ID | | | GCTTTGGCTGAGTAGT | GCUUUGGCUGAGUAGU |
| NO: 684] | NO: 1212] | NO: 800] | NO: 1328] | NO: 1032] | | | GAAATATATATTAAAC | GAAAUAUAUAUUAAAC |
| | (same as | | | | | | TCAGCCAAATACTTCT | UCAGCCAAAUACUUCU |
| | guide in XD- | | | | | | ACTATTAGTGTGACAG | ACUAUUAGUGUGACAG |
| | 14859) | | | | | | GGATACAGCAACTATT | GGAUACAGCAACUAUU |
| | | | | | | | TTATCAA | UUAUCAA |
| | | | | | | | [SEQ ID NO: 916] | [SEQ ID NO: 1444] |
| TGTAGTAGAAGG | UGUAGUAGAAGG | TCAGCCAAAGAA | UCAGCCAAAGAA | UCAGCCAAAGCC | -4.21076 | 2945 | ACCGGACATACTTGTT | ACCGGACAUACUUGUU |
| CTTTGGCTGA | CUUUGGCUGA | TTCTACTACT | UUCUACUACU | UUCUACUA | | | CCACTCTGTAGTAGAA | CCACUCUGUAGUAGAA |
| [SEQ ID | [SEQ ID | [SEQ ID | [SEQ ID | [SEQ ID | | | GGCTTTGGCTGATAGT | GGCUUUGGCUGAUAGU |
| NO: 685] | NO: 1213] | NO: 801] | NO: 1329] | NO: 1033] | | | GAAATATATATTAAAT | GAAAUAUAUAUUAAAU |
| | (same as | | | | | | CAGCCAAAGAATTCTA | CAGCCAAAGAAUUCUA |
| | guide in XD- | | | | | | CTACTTAGTGTGACAG | CUACUUAGUGUGACAG |
| | 14860) | | | | | | GGATACAGCAACTATT | GGAUACAGCAACUAUU |
| | | | | | | | TTATCAA | UUAUCAA |
| | | | | | | | [SEQ ID NO: 917] | [SEQ ID NO: 1445] |
| TGGTAGTAGAAG | UGGUAGUAGAAG | CAGCCAAAGCAC | CAGCCAAAGCAC | CAGCCAAAGCCU | -2.92638 | 2946 | ACCGGACATACTTGTT | ACCGGACAUACUUGUU |
| GCTTTGGCTG | GCUUUGGCUG | TCTACTACCT | UCUACUACCU | UCUACUAC | | | CCACTCTGGTAGTAGA | CCACUCUGGUAGUAGA |
| [SEQ ID | [SEQ ID | [SEQ ID | [SEQ ID | [SEQ ID | | | AGGCTTTGGCTGTAGT | AGGCUUUGGCUGUAGU |
| NO: 686] | NO: 1214] | NO: 802] | NO: 1330] | NO: 1034] | | | GAAATATATATTAAAC | GAAAUAUAUAUUAAAC |
| | (same as | | | | | | AGCCAAAGCACTCTAC | AGCCAAAGCACUCUAC |
| | guide in XD- | | | | | | TACCTTAGTGTGACAG | UACCUUAGUGUGACAG |
| | 14861) | | | | | | GGATACAGCAACTATT | GGAUACAGCAACUAUU |
| | | | | | | | TTATCAA | UUAUCAA |
| | | | | | | | [SEQ ID NO: 918] | [SEQ ID NO: 1446] |
| TGAACAAGGGGC | UGAACAAGGGGC | TCCCAAATCATA | UCCCAAAUCAUA | UCCCAAAUCAGC | -4.19616 | 3301 | ACCGGACATACTTGTT | ACCGGACAUACUUGUU |
| TGATTTGGGA | UGAUUUGGGA | CCCTTGTTCT | CCCUUGUUCU | CCCUUGUU | | | CCACTCTGAACAAGGG | CCACUCUGAACAAGGG |
| [SEQ ID | [SEQ ID | [SEQ ID | [SEQ ID | [SEQ ID | | | GCTGATTTGGGATAGT | GCUGAUUUGGGAUAGU |
| NO: 687] | NO: 1215] | NO: 803] | NO: 1331] | NO: 1035] | | | GAAATATATATTAAAT | GAAAUAUAUAUUAAAU |
| | | | | | | | CCCAAATCATACCCTT | CCCAAAUCAUACCCUU |
| | | | | | | | GTTCTTAGTGTGACAG | GUUCUUAGUGUGACAG |
| | | | | | | | GGATACAGCAACTATT | GGAUACAGCAACUAUU |
| | | | | | | | TTATCAA | UUAUCAA |
| | | | | | | | [SEQ ID NO: 919] | [SEQ ID NO: 1447] |
| TTGAACAAGGGG | UUGAACAAGGGG | CCCAAATCAGAA | CCCAAAUCAGAA | CCCAAAUCAGCC | -4.85857 | 3302 | ACCGGACATACTTGTT | ACCGGACAUACUUGUU |
| CTGATTTGGG | CUGAUUUGGG | CCTTGTTCAT | CCUUGUUCAU | CCUUGUUC | | | CCACTCTTGAACAAGG | CCACUCUUGAACAAGG |
| [SEQ ID | [SEQ ID | [SEQ ID | [SEQ ID | [SEQ ID | | | GGCTGATTTGGGTAGT | GGCUGAUUUGGGUAGU |
| NO: 688] | NO: 1216] | NO: 804] | NO: 1332] | NO: 1036] | | | GAAATATATATTAAAC | GAAAUAUAUAUUAAAC |
| | | | | | | | CCAAATCAGAACCTTG | CCAAAUCAGAACCUUG |
| | | | | | | | TTCATTAGTGTGACAG | UUCAUUAGUGUGACAG |
| | | | | | | | GGATACAGCAACTATT | GGAUACAGCAACUAUU |
| | | | | | | | TTATCAA | UUAUCAA |
| | | | | | | | [SEQ ID NO: 920] | [SEQ ID NO: 1448] |
| TCTGAACAAGGG | UCUGAACAAGGG | CCAAATCAGCAA | CCAAAUCAGCAA | CCAAAUCAGCCC | -2.36325 | 3303 | ACCGGACATACTTGTT | ACCGGACAUACUUGUU |
| GCTGATTTGG | GCUGAUUUGG | CTTGTTCAGT | CUUGUUCAGU | CUUGUUCA | | | CCACTCTCTGAACAAG | CCACUCUCUGAACAAG |
| [SEQ ID | [SEQ ID | [SEQ ID | [SEQ ID | [SEQ ID | | | GGGCTGATTTGGTAGT | GGGCUGAUUUGGUAGU |
| NO: 689] | NO: 1217] | NO: 805] | NO: 1333] | NO: 1037] | | | GAAATATATATTAAAC | GAAAUAUAUAUUAAAC |
| | | | | | | | CAAATCAGCAACTTGT | CAAAUCAGCAACUUGU |
| | | | | | | | TCAGTTAGTGTGACAG | UCAGUUAGUGUGACAG |
| | | | | | | | GGATACAGCAACTATT | GGAUACAGCAACUAUU |
| | | | | | | | TTATCAA | UUAUCAA |
| | | | | | | | [SEQ ID NO: 921] | [SEQ ID NO: 1449] |
| TGTGGCACATGC | UGUGGCACAUGC | CCCTTGTTCATA | CCCUUGUUCAUA | CCCUUGUUCAGC | -2.10246 | 3313 | ACCGGACATACTTGTT | ACCGGACAUACUUGUU |
| TGAACAAGGG | UGAACAAGGG | ATGTGCCACT | AUGUGCCACU | AUGUGCCA | | | CCACTCTGTGGCACAT | CCACUCUGUGGCACAU |
| [SEQ ID | [SEQ ID | [SEQ ID | [SEQ ID | [SEQ ID | | | GCTGAACAAGGGTAGT | GCUGAACAAGGGUAGU |
| NO: 690] | NO: 1218] | NO: 806] | NO: 1334] | NO: 1038] | | | GAAATATATATTAAAC | GAAAUAUAUAUUAAAC |
| | | | | | | | CCTTGTTCATAATGTG | CCUUGUUCAUAAUGUG |
| | | | | | | | CCACTTAGTGTGACAG | CCACUUAGUGUGACAG |
| | | | | | | | GGATACAGCAACTATT | GGAUACAGCAACUAUU |
| | | | | | | | TTATCAA | UUAUCAA |
| | | | | | | | [SEQ ID NO: 922] | [SEQ ID NO: 1450] |
| TTGCCATCATTC | UUGCCAUCAUUC | GGTAATGCTATG | GGUAAUGCUAUG | GGUAAUGCUAGA | -0.43513 | 3378 | ACCGGACATACTTGTT | ACCGGACAUACUUGUU |
| TAGCATTACC | UAGCAUUACC | ATGATGGCAT | AUGAUGGCAU | AUGAUGGC | | | CCACTCTTGCCATCAT | CCACUCUUGCCAUCAU |
| [SEQ ID | [SEQ ID | [SEQ ID | [SEQ ID | [SEQ ID | | | TCTAGCATTACCTAGT | UCUAGCAUUACCUAGU |
| NO: 691] | NO: 1219] | NO: 807] | NO: 1335] | NO: 1039] | | | GAAATATATATTAAAG | GAAAUAUAUAUUAAAG |
| | | | | | | | GTAATGCTATGATGAT | GUAAUGCUAUGAUGAU |
| | | | | | | | GGCATTAGTGTGACAG | GGCAUUAGUGUGACAG |
| | | | | | | | GGATACAGCAACTATT | GGAUACAGCAACUAUU |
| | | | | | | | TTATCAA | UUAUCAA |
| | | | | | | | [SEQ ID NO: 923] | [SEQ ID NO: 1451] |
| TTGCTGGGAAAC | UUGCUGGGAAAC | CCACAGAATATC | CCACAGAAUAUC | CCACAGAAUAGU | -2.70652 | 3804 | ACCGGACATACTTGTT | ACCGGACAUACUUGUU |
| TATTCTGTGG | UAUUCUGUGG | TTCCCAGCAT | UUCCCAGCAU | UUCCCAGC | | | CCACTCTTGCTGGGAA | CCACUCUUGCUGGGAA |
| [SEQ ID | [SEQ ID | [SEQ ID | [SEQ ID | [SEQ ID | | | ACTATTCTGTGGTAGT | ACUAUUCUGUGGUAGU |
| NO: 692] | NO: 1220] | NO: 808] | NO: 1336] | NO: 1040] | | | GAAATATATATTAAAC | GAAAUAUAUAUUAAAC |
| | (same as | | | | | | CACAGAATATCTTCCC | CACAGAAUAUCUUCCC |
| | guide in XD- | | | | | | AGCATTAGTGTGACAG | AGCAUUAGUGUGACAG |
| | 14861) | | | | | | GGATACAGCAACTATT | GGAUACAGCAACUAUU |
| | | | | | | | TTATCAA | UUAUCAA |
| | | | | | | | [SEQ ID NO: 924] | [SEQ ID NO: 1452] |
| TCTGCTGGGAAA | UCUGCUGGGAAA | CACAGAATAGCC | CACAGAAUAGCC | CACAGAAUAGUU | -4.91212 | 3805 | ACCGGACATACTTGTT | ACCGGACAUACUUGUU |
| CTATTCTGTG | CUAUUCUGUG | TCCCAGCAGT | UCCCAGCAGU | UCCCAGCA | | | CCACTCTCTGCTGGGA | CCACUCUCUGCUGGGA |
| [SEQ ID | [SEQ ID | [SEQ ID | [SEQ ID | [SEQ ID | | | AACTATTCTGTGTAGT | AACUAUUCUGUGUAGU |
| NO: 693] | NO: 1221] | NO: 809] | NO: 1337] | NO: 1041] | | | GAAATATATATTAAAC | GAAAUAUAUAUUAAAC |
| | | | | | | | ACAGAATAGCCTCCCA | ACAGAAUAGCCUCCCA |
| | | | | | | | GCAGTTAGTGTGACAG | GCAGUUAGUGUGACAG |
| | | | | | | | GGATACAGCAACTATT | GGAUACAGCAACUAUU |
| | | | | | | | TTATCAA | UUAUCAA |
| | | | | | | | [SEQ ID NO: 925] | [SEQ ID NO: 1453] |
| TGCTGCTGGGAA | UGCUGCUGGGAA | ACAGAATAGTCC | ACAGAAUAGUCC | ACAGAAUAGUUU | -3.54976 | 3806 | ACCGGACATACTTGTT | ACCGGACAUACUUGUU |
| ACTATTCTGT | ACUAUUCUGU | CCCAGCAGCT | CCCAGCAGCU | CCCAGCAG | | | CCACTCTGCTGCTGGG | CCACUCUGCUGCUGGG |
| [SEQ ID | [SEQ ID | [SEQ ID | [SEQ ID | [SEQ ID | | | AAACTATTCTGTTAGT | AAACUAUUCUGUUAGU |
| NO: 694] | NO: 1222] | NO: 810] | NO: 1338] | NO: 1042] | | | GAAATATATATTAAAA | GAAAUAUAUAUUAAAA |
| | | | | | | | CAGAATAGTCCCCCAG | CAGAAUAGUCCCCCAG |
| | | | | | | | CAGCTTAGTGTGACAG | CAGCUUAGUGUGACAG |
| | | | | | | | GGATACAGCAACTATT | GGAUACAGCAACUAUU |
| | | | | | | | TTATCAA | UUAUCAA |
| | | | | | | | [SEQ ID NO: 926] | [SEQ ID NO: 1454] |
| TGAACGTGAGAA | UGAACGUGAGAA | CGATCCATCCCC | CGAUCCAUCCCC | CGAUCCAUCCUU | -3.0586 | 3844 | ACCGGACATACTTGTT | ACCGGACAUACUUGUU |
| GGATGGATCG | GGAUGGAUCG | CTCACGTTCT | CUCACGUUCU | CUCACGUU | | | CCACTCTGAACGTGAG | CCACUCUGAACGUGAG |
| [SEQ ID | [SEQ ID | [SEQ ID | [SEQ ID | [SEQ ID | | | AAGGATGGATCGTAGT | AAGGAUGGAUCGUAGU |
| NO: 695] | NO: 1223] | NO: 811] | NO: 1339] | NO: 1043] | | | GAAATATATATTAAAC | GAAAUAUAUAUUAAAC |
| | | | | | | | GATCCATCCCCCTCAC | GAUCCAUCCCCCUCAC |
| | | | | | | | GTTCTTAGTGTGACAG | GUUCUUAGUGUGACAG |
| | | | | | | | GGATACAGCAACTATT | GGAUACAGCAACUAUU |
| | | | | | | | TTATCAA | UUAUCAA |
| | | | | | | | [SEQ ID NO: 927] | [SEQ ID NO: 1455] |
| TTGAACGTGAGA | UUGAACGUGAGA | GATCCATCCTCA | GAUCCAUCCUCA | GAUCCAUCCUUC | -4.40112 | 3845 | ACCGGACATACTTGTT | ACCGGACAUACUUGUU |
| AGGATGGATC | AGGAUGGAUC | TCACGTTCAT | UCACGUUCAU | UCACGUUC | | | CCACTCTTGAACGTGA | CCACUCUUGAACGUGA |
| [SEQ ID | [SEQ ID | [SEQ ID | [SEQ ID | [SEQ ID | | | GAAGGATGGATCTAGT | GAAGGAUGGAUCUAGU |
| NO: 696] | NO: 1224] | NO: 812] | NO: 1340] | NO: 1044] | | | GAAATATATATTAAAG | GAAAUAUAUAUUAAAG |
| | | | | | | | ATCCATCCTCATCACG | AUCCAUCCUCAUCACG |
| | | | | | | | TTCATTAGTGTGACAG | UUCAUUAGUGUGACAG |
| | | | | | | | GGATACAGCAACTATT | GGAUACAGCAACUAUU |
| | | | | | | | TTATCAA | UUAUCAA |
| | | | | | | | [SEQ ID NO: 928] | [SEQ ID NO: 1456] |
| TCTGAACGTGAG | UCUGAACGUGAG | ATCCATCCTTAC | AUCCAUCCUUAC | AUCCAUCCUUCU | -2.54571 | 3846 | ACCGGACATACTTGTT | ACCGGACAUACUUGUU |
| AAGGATGGAT | AAGGAUGGAU | CACGTTCAGT | CACGUUCAGU | CACGUUCA | | | CCACTCTCTGAACGTG | CCACUCUCUGAACGUG |
| [SEQ ID | [SEQ ID | [SEQ ID | [SEQ ID | [SEQ ID | | | AGAAGGATGGATTAGT | AGAAGGAUGGAUUAGU |
| NO: 697] | NO: 1225] | NO: 813] | NO: 1341] | NO: 1045] | | | GAAATATATATTAAAA | GAAAUAUAUAUUAAAA |
| | | | | | | | TCCATCCTTACCACGT | UCCAUCCUUACCACGU |
| | | | | | | | TCAGTTAGTGTGACAG | UCAGUUAGUGUGACAG |
| | | | | | | | GGATACAGCAACTATT | GGAUACAGCAACUAUU |
| | | | | | | | TTATCAA | UUAUCAA |
| | | | | | | | [SEQ ID NO: 929] | [SEQ ID NO: 1457] |
| AACTGTTAGCAT | AACUGUUAGCAU | TCCAATAGGAGC | UCCAAUAGGAGC | UCCAAUAGGAAU | -3.8378 | 4235 | ACCGGACATACTTGTT | ACCGGACAUACUUGUU |
| TCCTATTGGA | UCCUAUUGGA | GCTAACAGTA | GCUAACAGUA | GCUAACAG | | | CCACTCAACTGTTAGC | CCACUCAACUGUUAGC |
| [SEQ ID | [SEQ ID | [SEQ ID | [SEQ ID | [SEQ ID | | | ATTCCTATTGGATAGT | AUUCCUAUUGGAUAGU |
| NO: 698] | NO: 1226] | NO: 814] | NO: 1342] | NO: 1046] | | | GAAATATATATTAAAT | GAAAUAUAUAUUAAAU |
| | | | | | | | CCAATAGGAGCGCTAA | CCAAUAGGAGCGCUAA |
| | | | | | | | CAGTATAGTGTGACAG | CAGUAUAGUGUGACAG |
| | | | | | | | GGATACAGCAACTATT | GGAUACAGCAACUAUU |
| | | | | | | | TTATCAA | UUAUCAA |
| | | | | | | | [SEQ ID NO: 930] | [SEQ ID NO: 1458] |
| TAACTGTTAGCA | UAACUGUUAGCA | CCAATAGGAACT | CCAAUAGGAACU | CCAAUAGGAAUG | -2.52035 | 4236 | ACCGGACATACTTGTT | ACCGGACAUACUUGUU |
| TTCCTATTGG | UUCCUAUUGG | CTAACAGTTT | CUAACAGUUU | CUAACAGU | | | CCACTCTAACTGTTAG | CCACUCUAACUGUUAG |
| [SEQ ID | [SEQ ID | [SEQ ID | [SEQ ID | [SEQ ID | | | CATTCCTATTGGTAGT | CAUUCCUAUUGGUAGU |
| NO: 699] | NO: 1227] | NO: 815] | NO: 1343] | NO: 1047] | | | GAAATATATATTAAAC | GAAAUAUAUAUUAAAC |
| | | | | | | | CAATAGGAACTCTAAC | CAAUAGGAACUCUAAC |
| | | | | | | | AGTTTTAGTGTGACAG | AGUUUUAGUGUGACAG |
| | | | | | | | GGATACAGCAACTATT | GGAUACAGCAACUAUU |
| | | | | | | | TTATCAA | UUAUCAA |
| | | | | | | | [SEQ ID NO: 931] | [SEQ ID NO: 1459] |
| TGAACTGTTAGC | UGAACUGUUAGC | CAATAGGAATTA | CAAUAGGAAUUA | CAAUAGGAAUGC | -4.90789 | 4237 | ACCGGACATACTTGTT | ACCGGACAUACUUGUU |
| ATTCCTATTG | AUUCCUAUUG | TAACAGTTCT | UAACAGUUCU | UAACAGUU | | | CCACTCTGAACTGTTA | CCACUCUGAACUGUUA |
| [SEQ ID | [SEQ ID | [SEQ ID | [ SEQ ID | [SEQ ID | | | GCATTCCTATTGTAGT | GCAUUCCUAUUGUAGU |
| NO: 700] | NO: 1228] | NO: 816] | NO: 1344] | NO: 1048] | | | GAAATATATATTAAAC | GAAAUAUAUAUUAAAC |
| | | | | | | | AATAGGAATTATAACA | AAUAGGAAUUAUAACA |
| | | | | | | | GTTCTTAGTGTGACAG | GUUCUUAGUGUGACAG |
| | | | | | | | GGATACAGCAACTATT | GGAUACAGCAACUAUU |
| | | | | | | | TTATCAA | UUAUCAA |
| | | | | | | | [SEQ ID NO: 932] | [SEQ ID NO: 1460] |
| TTGAACTGTTAG | UUGAACUGUUAG | AATAGGAATGAC | AAUAGGAAUGAC | AAUAGGAAUGCU | -3.95764 | 4238 | ACCGGACATACTTGTT | ACCGGACAUACUUGUU |
| CATTCCTATT | CAUUCCUAUU | AACAGTTCAT | AACAGUUCAU | AACAGUUC | | | CCACTCTTGAACTGTT | CCACUCUUGAACUGUU |
| [SEQ ID | [ SEQ ID | [SEQ ID | [SEQ ID | [SEQ ID | | | AGCATTCCTATTTAGT | AGCAUUCCUAUUUAGU |
| NO: 701] | NO: 1229] | NO: 817] | NO: 1345] | NO: 1049] | | | GAAATATATATTAAAA | GAAAUAUAUAUUAAAA |
| | | | | | | | ATAGGAATGACAACAG | AUAGGAAUGACAACAG |
| | | | | | | | TTCATTAGTGTGACAG | UUCAUUAGUGUGACAG |
| | | | | | | | GGATACAGCAACTATT | GGAUACAGCAACUAUU |
| | | | | | | | TTATCAA | UUAUCAA |
| | | | | | | | [SEQ ID NO: 933] | [SEQ ID NO: 1461] |
| AGTGAACTGTTA | AGUGAACUGUUA | ATAGGAATGCCG | AUAGGAAUGCCG | AUAGGAAUGCUA | -4.39189 | 4239 | ACCGGACATACTTGTT | ACCGGACAUACUUGUU |
| GCATTCCTAT | GCAUUCCUAU | ACAGTTCACA | ACAGUUCACA | ACAGUUCA | | | CCACTCAGTGAACTGT | CCACUCAGUGAACUGU |
| [SEQ ID | [SEQ ID | [SEQ ID | [SEQ ID | [SEQ ID | | | TAGCATTCCTATTAGT | UAGCAUUCCUAUUAGU |
| NO: 702] | NO: 1230] | NO: 818] | NO: 1346] | NO: 1050] | | | GAAATATATATTAAAA | GAAAUAUAUAUUAAAA |
| | | | | | | | TAGGAATGCCGACAGT | UAGGAAUGCCGACAGU |
| | | | | | | | TCACATAGTGTGACAG | UCACAUAGUGUGACAG |
| | | | | | | | GGATACAGCAACTATT | GGAUACAGCAACUAUU |
| | | | | | | | TTATCAA | UUAUCAA |
| | | | | | | | [SEQ ID NO: 934] | [SEQ ID NO: 1462] |
| AAGTGAACTGTT | AAGUGAACUGUU | TAGGAATGCTGG | UAGGAAUGCUGG | UAGGAAUGCUAA | -4.80102 | 4240 | ACCGGACATACTTGTT | ACCGGACAUACUUGUU |
| AGCATTCCTA | AGCAUUCCUA | CAGTTCACTA | CAGUUCACUA | CAGUUCAC | | | CCACTCAAGTGAACTG | CCACUCAAGUGAACUG |
| [SEQ ID | [ SEQ ID | [SEQ ID | [SEQ ID | [SEQ ID | | | TTAGCATTCCTATAGT | UUAGCAUUCCUAUAGU |
| NO: 703] | NO: 1231] | NO: 819] | NO: 1347] | NO: 1051] | | | GAAATATATATTAAAT | GAAAUAUAUAUUAAAU |
| | | | | | | | AGGAATGCTGGCAGTT | AGGAAUGCUGGCAGUU |
| | | | | | | | CACTATAGTGTGACAG | CACUAUAGUGUGACAG |
| | | | | | | | GGATACAGCAACTATT | GGAUACAGCAACUAUU |
| | | | | | | | TTATCAA | UUAUCAA |
| | | | | | | | [SEQ ID NO: 935] | [SEQ ID NO: 1463] |
| TAAGTGAACTGT | UAAGUGAACUGU | AGGAATGCTAGA | AGGAAUGCUAGA | AGGAAUGCUAAC | -2.45702 | 4241 | ACCGGACATACTTGTT | ACCGGACAUACUUGUU |
| TAGCATTCCT | UAGCAUUCCU | AGTTCACTTT | AGUUCACUUU | AGUUCACU | | | CCACTCTAAGTGAACT | CCACUCUAAGUGAACU |
| [SEQ ID | [SEQ ID | [SEQ ID | [SEQ ID | [SEQ ID | | | GTTAGCATTCCTTAGT | GUUAGCAUUCCUUAGU |
| NO: 704] | NO: 1232] | NO: 820] | NO: 1348] | NO: 1052] | | | GAAATATATATTAAAA | GAAAUAUAUAUUAAAA |
| | | | | | | | GGAATGCTAGAAGTTC | GGAAUGCUAGAAGUUC |
| | | | | | | | ACTTTTAGTGTGACAG | ACUUUUAGUGUGACAG |
| | | | | | | | GGATACAGCAACTATT | GGAUACAGCAACUAUU |
| | | | | | | | TTATCAA | UUAUCAA |
| | | | | | | | [SEQ ID NO: 936] | [SEQ ID NO: 1464] |
| TCAAGTGAACTG | UCAAGUGAACUG | GGAATGCTAAAG | GGAAUGCUAAAG | GGAAUGCUAACA | -4.855 | 4242 | ACCGGACATACTTGTT | ACCGGACAUACUUGUU |
| TTAGCATTCC | UUAGCAUUCC | GTTCACTTGT | GUUCACUUGU | GUUCACUU | | | CCACTCTCAAGTGAAC | CCACUCUCAAGUGAAC |
| [SEQ ID | [SEQ ID | [SEQ ID | [SEQ ID | [SEQ ID | | | TGTTAGCATTCCTAGT | UGUUAGCAUUCCUAGU |
| NO: 705] | NO: 1233] | NO: 821] | NO: 1349] | NO: 1053] | | | GAAATATATATTAAAG | GAAAUAUAUAUUAAAG |
| | | | | | | | GAATGCTAAAGGTTCA | GAAUGCUAAAGGUUCA |
| | | | | | | | CTTGTTAGTGTGACAG | CUUGUUAGUGUGACAG |
| | | | | | | | GGATACAGCAACTATT | GGAUACAGCAACUAUU |
| | | | | | | | TTATCAA | UUAUCAA |
| | | | | | | | [SEQ ID NO: 937] | [SEQ ID NO: 1465] |
| TGCAAGTGAACT | UGCAAGUGAACU | GAATGCTAACGT | GAAUGCUAACGU | GAAUGCUAACAG | -4.05556 | 4243 | ACCGGACATACTTGTT | ACCGGACAUACUUGUU |
| GTTAGCATTC | GUUAGCAUUC | TTCACTTGCT | UUCACUUGCU | UUCACUUG | | | CCACTCTGCAAGTGAA | CCACUCUGCAAGUGAA |
| [SEQ ID | [SEQ ID | [SEQ ID | [SEQ ID | [SEQ ID | | | CTGTTAGCATTCTAGT | CUGUUAGCAUUCUAGU |
| NO: 706] | NO: 1234] | NO: 822] | NO: 1350] | NO: 1054] | | | GAAATATATATTAAAG | GAAAUAUAUAUUAAAG |
| | | | | | | | AATGCTAACGTTTCAC | AAUGCUAACGUUUCAC |
| | | | | | | | TTGCTTAGTGTGACAG | UUGCUUAGUGUGACAG |
| | | | | | | | GGATACAGCAACTATT | GGAUACAGCAACUAUU |
| | | | | | | | TTATCAA | UUAUCAA |
| | | | | | | | [SEQ ID NO: 938] | [SEQ ID NO: 1466] |
| TTGCAAGTGAAC | UUGCAAGUGAAC | AATGCTAACATC | AAUGCUAACAUC | AAUGCUAACAGU | -3.92834 | 4244 | ACCGGACATACTTGTT | ACCGGACAUACUUGUU |
| TGTTAGCATT | UGUUAGCAUU | TCACTTGCAT | UCACUUGCAU | UCACUUGC | | | CCACTCTTGCAAGTGA | CCACUCUUGCAAGUGA |
| [SEQ ID | [SEQ ID | [SEQ ID | [SEQ ID | [SEQ ID | | | ACTGTTAGCATTTAGT | ACUGUUAGCAUUUAGU |
| NO: 707] | NO: 1235] | NO: 823] | NO: 1351] | NO: 1055] | | | GAAATATATATTAAAA | GAAAUAUAUAUUAAAA |
| | | | | | | | ATGCTAACATCTCACT | AUGCUAACAUCUCACU |
| | | | | | | | TGCATTAGTGTGACAG | UGCAUUAGUGUGACAG |
| | | | | | | | GGATACAGCAACTATT | GGAUACAGCAACUAUU |
| | | | | | | | TTATCAA | UUAUCAA |
| | | | | | | | [SEQ ID NO: 939] | [SEQ ID NO: 1467] |
| ACTGCAAGTGAA | ACUGCAAGUGAA | ATGCTAACAGCC | AUGCUAACAGCC | AUGCUAACAGUU | -4.32689 | 4245 | ACCGGACATACTTGTT | ACCGGACAUACUUGUU |
| CTGTTAGCAT | CUGUUAGCAU | CACTTGCAGA | CACUUGCAGA | CACUUGCA | | | CCACTCACTGCAAGTG | CCACUCACUGCAAGUG |
| [SEQ ID | [SEQ ID | [SEQ ID | [SEQ ID | [SEQ ID | | | AACTGTTAGCATTAGT | AACUGUUAGCAUUAGU |
| NO: 708] | NO: 1236] | NO: 824] | NO: 1352] | NO: 1056] | | | GAAATATATATTAAAA | GAAAUAUAUAUUAAAA |
| | | | | | | | TGCTAACAGCCCACTT | UGCUAACAGCCCACUU |
| | | | | | | | GCAGATAGTGTGACAG | GCAGAUAGUGUGACAG |
| | | | | | | | GGATACAGCAACTATT | GGAUACAGCAACUAUU |
| | | | | | | | TTATCAA | UUAUCAA |
| | | | | | | | [SEQ ID NO: 940] | [SEQ ID NO: 1468] |
| TACTGCAAGTGA | UACUGCAAGUGA | TGCTAACAGTCA | UGCUAACAGUCA | UGCUAACAGUUC | -4.77129 | 4246 | ACCGGACATACTTGTT | ACCGGACAUACUUGUU |
| ACTGTTAGCA | ACUGUUAGCA | ACTTGCAGTT | ACUUGCAGUU | ACUUGCAG | | | CCACTCTACTGCAAGT | CCACUCUACUGCAAGU |
| [SEQ ID | [SEQ ID | [SEQ ID | [SEQ ID | [SEQ ID | | | GAACTGTTAGCATAGT | GAACUGUUAGCAUAGU |
| NO: 709] | NO: 1237] | NO: 825] | NO: 1353] | NO: 1057] | | | GAAATATATATTAAAT | GAAAUAUAUAUUAAAU |
| | | | | | | | GCTAACAGTCAACTTG | GCUAACAGUCAACUUG |
| | | | | | | | CAGTTTAGTGTGACAG | CAGUUUAGUGUGACAG |
| | | | | | | | GGATACAGCAACTATT | GGAUACAGCAACUAUU |
| | | | | | | | TTATCAA | UUAUCAA |
| | | | | | | | [SEQ ID NO: 941] | [SEQ ID NO: 1469] |
| TCACTGCAAGTG | UCACUGCAAGUG | GCTAACAGTTAG | GCUAACAGUUAG | GCUAACAGUUCA | -3.83727 | 4247 | ACCGGACATACTTGTT | ACCGGACAUACUUGUU |
| AACTGTTAGC | AACUGUUAGC | CTTGCAGTGT | CUUGCAGUGU | CUUGCAGU | | | CCACTCTCACTGCAAG | CCACUCUCACUGCAAG |
| [SEQ ID | [SEQ ID | [SEQ ID | [SEQ ID | [SEQ ID | | | TGAACTGTTAGCTAGT | UGAACUGUUAGCUAGU |
| NO: 710] | NO: 1238] | NO: 826] | NO: 1354] | NO: 1058] | | | GAAATATATATTAAAG | GAAAUAUAUAUUAAAG |
| | | | | | | | CTAACAGTTAGCTTGC | CUAACAGUUAGCUUGC |
| | | | | | | | AGTGTTAGTGTGACAG | AGUGUUAGUGUGACAG |
| | | | | | | | GGATACAGCAACTATT | GGAUACAGCAACUAUU |
| | | | | | | | TTATCAA | UUAUCAA |
| | | | | | | | [SEQ ID NO: 942 | [SEQ ID NO: 1470] |
| TCCACTGCAAGT | UCCACUGCAAGU | CTAACAGTTCGA | CUAACAGUUCGA | CUAACAGUUCAC | -4.9039 | 4248 | ACCGGACATACTTGTT | ACCGGACAUACUUGUU |
| GAACTGTTAG | GAACUGUUAG | TTGCAGTGGT | UUGCAGUGGU | UUGCAGUG | | | CCACTCTCCACTGCAA | CCACUCUCCACUGCAA |
| [SEQ ID | [SEQ ID | [SEQ ID | [SEQ ID | [SEQ ID | | | GTGAACTGTTAGTAGT | GUGAACUGUUAGUAGU |
| NO: 711] | NO: 1239] | NO: 827] | NO: 1355] | NO: 1059] | | | GAAATATATATTAAAC | GAAAUAUAUAUUAAAC |
| | | | | | | | TAACAGTTCGATTGCA | UAACAGUUCGAUUGCA |
| | | | | | | | GTGGTTAGTGTGACAG | GUGGUUAGUGUGACAG |
| | | | | | | | GGATACAGCAACTATT | GGAUACAGCAACUAUU |
| | | | | | | | TTATCAA | UUAUCAA |
| | | | | | | | [SEQ ID NO: 943] | [SEQ ID NO: 1471] |
| TTCCACTGCAAG | UUCCACUGCAAG | TAACAGTTCAAC | UAACAGUUCAAC | UAACAGUUCACU | -3.84653 | 4249 | ACCGGACATACTTGTT | ACCGGACAUACUUGUU |
| TGAACTGTTA | UGAACUGUUA | TGCAGTGGAT | UGCAGUGGAU | UGCAGUGG | | | CCACTCTTCCACTGCA | CCACUCUUCCACUGCA |
| [SEQ ID | [SEQ ID | [SEQ ID | [SEQ ID | [SEQ ID | | | AGTGAACTGTTATAGT | AGUGAACUGUUAUAGU |
| NO: 712] | NO: 1240] | NO: 828] | NO: 1356] | NO: 1060] | | | GAAATATATATTAAAT | GAAAUAUAUAUUAAAU |
| | | | | | | | AACAGTTCAACTGCAG | AACAGUUCAACUGCAG |
| | | | | | | | TGGATTAGTGTGACAG | UGGAUUAGUGUGACAG |
| | | | | | | | GGATACAGCAACTATT | GGAUACAGCAACUAUU |
| | | | | | | | TTATCAA | UUAUCAA |
| | | | | | | | [SEQ ID NO: 944] | [SEQ ID NO: 1472] |
| TTTCCACTGCAA | UUUCCACUGCAA | AACAGTTCACCC | AACAGUUCACCC | AACAGUUCACUU | -3.95941 | 4250 | ACCGGACATACTTGTT | ACCGGACAUACUUGUU |
| GTGAACTGTT | GUGAACUGUU | GCAGTGGAAT | GCAGUGGAAU | GCAGUGGA | | | CCACTCTTTCCACTGC | CCACUCUUUCCACUGC |
| [SEQ ID | [SEQ ID | [SEQ ID | [SEQ ID | [SEQ ID | | | AAGTGAACTGTTTAGT | AAGUGAACUGUUUAGU |
| NO: 713] | NO: 1241] | NO: 829] | NO: 1357] | NO: 1061] | | | GAAATATATATTAAAA | GAAAUAUAUAUUAAAA |
| | | | | | | | ACAGTTCACCCGCAGT | ACAGUUCACCCGCAGU |
| | | | | | | | GGAATTAGTGTGACAG | GGAAUUAGUGUGACAG |
| | | | | | | | GGATACAGCAACTATT | GGAUACAGCAACUAUU |
| | | | | | | | TTATCAA | UUAUCAA |
| | | | | | | | [SEQ ID NO: 945] | [SEQ ID NO: 1473] |
| TCTTCCACTGCA | UCUUCCACUGCA | ACAGTTCACTCT | ACAGUUCACUCU | ACAGUUCACUUG | -4.68439 | 4251 | ACCGGACATACTTGTT | ACCGGACAUACUUGUU |
| AGTGAACTGT | AGUGAACUGU | CAGTGGAAGT | CAGUGGAAGU | CAGUGGAA | | | CCACTCTCTTCCACTG | CCACUCUCUUCCACUG |
| [SEQ ID | [SEQ ID | [SEQ ID | [SEQ ID | [SEQ ID | | | CAAGTGAACTGTTAGT | CAAGUGAACUGUUAGU |
| NO: 714] | NO: 1242] | NO: 830] | NO: 1358] | NO: 1062] | | | GAAATATATATTAAAA | GAAAUAUAUAUUAAAA |
| | | | | | | | CAGTTCACTCTCAGTG | CAGUUCACUCUCAGUG |
| | | | | | | | GAAGTTAGTGTGACAG | GAAGUUAGUGUGACAG |
| | | | | | | | GGATACAGCAACTATT | GGAUACAGCAACUAUU |
| | | | | | | | TTATCAA | UUAUCAA |
| | | | | | | | [SEQ ID NO: 946] | [SEQ ID NO: 1474] |
| ATCTTCCACTGC | AUCUUCCACUGC | CAGTTCACTTTA | CAGUUCACUUUA | CAGUUCACUUGC | -2.98094 | 4252 | ACCGGACATACTTGTT | ACCGGACAUACUUGUU |
| AAGTGAACTG | AAGUGAACUG | AGTGGAAGAA | AGUGGAAGAA | AGUGGAAG | | | CCACTCATCTTCCACT | CCACUCAUCUUCCACU |
| [SEQ ID | [SEQ ID | [SEQ ID | [SEQ ID | [SEQ ID | | | GCAAGTGAACTGTAGT | GCAAGUGAACUGUAGU |
| NO: 715] | NO: 1243] | NO: 831] | NO: 1359] | NO: 1063] | | | GAAATATATATTAAAC | GAAAUAUAUAUUAAAC |
| | | | | | | | AGTTCACTTTAAGTGG | AGUUCACUUUAAGUGG |
| | | | | | | | AAGAATAGTGTGACAG | AAGAAUAGUGUGACAG |
| | | | | | | | GGATACAGCAACTATT | GGAUACAGCAACUAUU |
| | | | | | | | TTATCAA | UUAUCAA |
| | | | | | | | [SEQ ID NO: 947] | [SEQ ID NO: 1475] |
| TATCTTCCACTG | UAUCUUCCACUG | AGTTCACTTGAG | AGUUCACUUGAG | AGUUCACUUGCA | -3.46197 | 4253 | ACCGGACATACTTGTT | ACCGGACAUACUUGUU |
| CAAGTGAACT | CAAGUGAACU | GTGGAAGATT | GUGGAAGAUU | GUGGAAGA | | | CCACTCTATCTTCCAC | CCACUCUAUCUUCCAC |
| [SEQ ID | [SEQ ID | [SEQ ID | [SEQ ID | [SEQ ID | | | TGCAAGTGAACTTAGT | UGCAAGUGAACUUAGU |
| NO: 716] | NO: 1244] | NO: 832] | NO: 1360] | NO: 1064] | | | GAAATATATATTAAAA | GAAAUAUAUAUUAAAA |
| | | | | | | | GTTCACTTGAGGTGGA | GUUCACUUGAGGUGGA |
| | | | | | | | AGATTTAGTGTGACAG | AGAUUUAGUGUGACAG |
| | | | | | | | GGATACAGCAACTATT | GGAUACAGCAACUAUU |
| | | | | | | | TTATCAA | UUAUCAA |
| | | | | | | | [SEQ ID NO: 948] | [SEQ ID NO: 1476] |
| TGGCAAGCAGAG | UGGCAAGCAGAG | GGTACCCCAGAC | GGUACCCCAGAC | GGUACCCCAGCU | -3.53049 | 4348 | ACCGGACATACTTGTT | ACCGGACAUACUUGUU |
| CTGGGGTACC | CUGGGGUACC | CTGCTTGCCT | CUGCUUGCCU | CUGCUUGC | | | CCACTCTGGCAAGCAG | CCACUCUGGCAAGCAG |
| [SEQ ID | [SEQ ID | [SEQ ID | [SEQ ID | [SEQ ID | | | AGCTGGGGTACCTAGT | AGCUGGGGUACCUAGU |
| NO: 717] | NO: 1245] | NO: 833] | NO: 1361] | NO: 1065] | | | GAAATATATATTAAAG | GAAAUAUAUAUUAAAG |
| | | | | | | | GTACCCCAGACCTGCT | GUACCCCAGACCUGCU |
| | | | | | | | TGCCTTAGTGTGACAG | UGCCUUAGUGUGACAG |
| | | | | | | | GGATACAGCAACTATT | GGAUACAGCAACUAUU |
| | | | | | | | TTATCAA | UUAUCAA |
| | | | | | | | [SEQ ID NO: 949] | [SEQ ID NO: 1477] |
| TCGGCAAGCAGA | UCGGCAAGCAGA | GTACCCCAGCCA | GUACCCCAGCCA | GUACCCCAGCUC | -4.36361 | 4349 | ACCGGACATACTTGTT | ACCGGACAUACUUGUU |
| GCTGGGGTAC | GCUGGGGUAC | TGCTTGCCGT | UGCUUGCCGU | UGCUUGCC | | | CCACTCTCGGCAAGCA | CCACUCUCGGCAAGCA |
| [SEQ ID | [SEQ ID | [SEQ ID | [SEQ ID | [SEQ ID | | | GAGCTGGGGTACTAGT | GAGCUGGGGUACUAGU |
| NO: 718] | NO: 1246] | NO: 834] | NO: 1362] | NO: 1066] | | | GAAATATATATTAAAG | GAAAUAUAUAUUAAAG |
| | | | | | | | TACCCCAGCCATGCTT | UACCCCAGCCAUGCUU |
| | | | | | | | GCCGTTAGTGTGACAG | GCCGUUAGUGUGACAG |
| | | | | | | | GGATACAGCAACTATT | GGAUACAGCAACUAUU |
| | | | | | | | TTATCAA | UUAUCAA |
| | | | | | | | [SEQ ID NO: 950] | [SEQ ID NO: 1478] |
| TTCGGCAAGCAG | UUCGGCAAGCAG | TACCCCAGCTAC | UACCCCAGCUAC | UACCCCAGCUCU | -4.40568 | 4350 | ACCGGACATACTTGTT | ACCGGACAUACUUGUU |
| AGCTGGGGTA | AGCUGGGGUA | GCTTGCCGAT | GCUUGCCGAU | GCUUGCCG | | | CCACTCTTCGGCAAGC | CCACUCUUCGGCAAGC |
| [SEQ ID | [SEQ ID | [SEQ ID | [SEQ ID | [SEQ ID | | | AGAGCTGGGGTATAGT | AGAGCUGGGGUAUAGU |
| NO: 719] | NO: 1247] | NO: 835] | NO: 1363] | NO: 1067] | | | GAAATATATATTAAAT | GAAAUAUAUAUUAAAU |
| | | | | | | | ACCCCAGCTACGCTTG | ACCCCAGCUACGCUUG |
| | | | | | | | CCGATTAGTGTGACAG | CCGAUUAGUGUGACAG |
| | | | | | | | GGATACAGCAACTATT | GGAUACAGCAACUAUU |
| | | | | | | | TTATCAA | UUAUCAA |
| | | | | | | | [SEQ ID NO: 951] | [SEQ ID NO: 1479] |
| TTTCGGCAAGCA | UUUCGGCAAGCA | ACCCCAGCTCCT | ACCCCAGCUCCU | ACCCCAGCUCUG | -3.51989 | 4351 | ACCGGACATACTTGTT | ACCGGACAUACUUGUU |
| GAGCTGGGGT | GAGCUGGGGU | CTTGCCGAAT | CUUGCCGAAU | CUUGCCGA | | | CCACTCTTTCGGCAAG | CCACUCUUUCGGCAAG |
| [SEQ ID | [SEQ ID | [SEQ ID | [SEQ ID | [SEQ ID | | | CAGAGCTGGGGTTAGT | CAGAGCUGGGGUUAGU |
| NO: 720] | NO: 1248] | NO: 836] | NO: 1364] | NO: 1068] | | | GAAATATATATTAAAA | GAAAUAUAUAUUAAAA |
| | | | | | | | CCCCAGCTCCTCTTGC | CCCCAGCUCCUCUUGC |
| | | | | | | | CGAATTAGTGTGACAG | CGAAUUAGUGUGACAG |
| | | | | | | | GGATACAGCAACTATT | GGAUACAGCAACUAUU |
| | | | | | | | TTATCAA | UUAUCAA |
| | | | | | | | [SEQ ID NO: 952] | [SEQ ID NO: 1480] |
| TTTTCGGCAAGC | UUUUCGGCAAGC | CCCCAGCTCTTA | CCCCAGCUCUUA | CCCCAGCUCUGC | -2.43883 | 4352 | ACCGGACATACTTGTT | ACCGGACAUACUUGUU |
| AGAGCTGGGG | AGAGCUGGGG | TTGCCGAAAT | UUGCCGAAAU | UUGCCGAA | | | CCACTCTTTTCGGCAA | CCACUCUUUUCGGCAA |
| [SEQ ID | [SEQ ID | [SEQ ID | [SEQ ID | [SEQ ID | | | GCAGAGCTGGGGTAGT | GCAGAGCUGGGGUAGU |
| NO: 721] | NO: 1249] | NO: 837] | NO: 1365] | NO: 1069] | | | GAAATATATATTAAAC | GAAAUAUAUAUUAAAC |
| | | | | | | | CCCAGCTCTTATTGCC | CCCAGCUCUUAUUGCC |
| | | | | | | | GAAATTAGTGTGACAG | GAAAUUAGUGUGACAG |
| | | | | | | | GGATACAGCAACTATT | GGAUACAGCAACUAUU |
| | | | | | | | TTATCAA | UUAUCAA |
| | | | | | | | [SEQ ID NO: 953] | [SEQ ID NO: 1481] |
| AGTTTCGGCAAG | AGUUUCGGCAAG | CCCAGCTCTGAC | CCCAGCUCUGAC | CCCAGCUCUGCU | -3.70458 | 4353 | ACCGGACATACTTGTT | ACCGGACAUACUUGUU |
| CAGAGCTGGG | CAGAGCUGGG | TGCCGAAACA | UGCCGAAACA | UGCCGAAA | | | CCACTCAGTTTCGGCA | CCACUCAGUUUCGGCA |
| [SEQ ID | [SEQ ID | [SEQ ID | [SEQ ID | [SEQ ID | | | AGCAGAGCTGGGTAGT | AGCAGAGCUGGGUAGU |
| NO: 722] | NO: 1250] | NO: 838] | NO: 1366] | NO: 1070] | | | GAAATATATATTAAAC | GAAAUAUAUAUUAAAC |
| | | | | | | | CCAGCTCTGACTGCCG | CCAGCUCUGACUGCCG |
| | | | | | | | AAACATAGTGTGACAG | AAACAUAGUGUGACAG |
| | | | | | | | GGATACAGCAACTATT | GGAUACAGCAACUAUU |
| | | | | | | | TTATCAA | UUAUCAA |
| | | | | | | | [SEQ ID NO: 954] | [SEQ ID NO: 1482] |
| TAGTTTCGGCAA | UAGUUUCGGCAA | CCAGCTCTGCCC | CCAGCUCUGCCC | CCAGCUCUGCUU | -2.834 | 4354 | ACCGGACATACTTGTT | ACCGGACAUACUUGUU |
| GCAGAGCTGG | GCAGAGCUGG | GCCGAAACTT | GCCGAAACUU | GCCGAAAC | | | CCACTCTAGTTTCGGC | CCACUCUAGUUUCGGC |
| [SEQ ID | [SEQ ID | [SEQ ID | [SEQ ID | [SEQ ID | | | AAGCAGAGCTGGTAGT | AAGCAGAGCUGGUAGU |
| NO: 723] | NO: 1251] | NO: 839] | NO: 1367] | NO: 1071] | | | GAAATATATATTAAAC | GAAAUAUAUAUUAAAC |
| | | | | | | | CAGCTCTGCCCGCCGA | CAGCUCUGCCCGCCGA |
| | | | | | | | AACTTTAGTGTGACAG | AACUUUAGUGUGACAG |
| | | | | | | | GGATACAGCAACTATT | GGAUACAGCAACUAUU |
| | | | | | | | TTATCAA | UUAUCAA |
| | | | | | | | [SEQ ID NO: 955] | [SEQ ID NO: 1483] |
| TCAGTTTCGGCA | UCAGUUUCGGCA | CAGCTCTGCTCT | CAGCUCUGCUCU | CAGCUCUGCUUG | -4.92603 | 4355 | ACCGGACATACTTGTT | ACCGGACAUACUUGUU |
| AGCAGAGCTG | AGCAGAGCUG | CCGAAACTGT | CCGAAACUGU | CCGAAACU | | | CCACTCTCAGTTTCGG | CCACUCUCAGUUUCGG |
| [SEQ ID | [SEQ ID | [SEQ ID | [SEQ ID | [SEQ ID | | | CAAGCAGAGCTGTAGT | CAAGCAGAGCUGUAGU |
| NO: 724] | NO: 1252] | NO: 840] | NO: 1368] | NO: 1072] | | | GAAATATATATTAAAC | GAAAUAUAUAUUAAAC |
| | | | | | | | AGCTCTGCTCTCCGAA | AGCUCUGCUCUCCGAA |
| | | | | | | | ACTGTTAGTGTGACAG | ACUGUUAGUGUGACAG |
| | | | | | | | GGATACAGCAACTATT | GGAUACAGCAACUAUU |
| | | | | | | | TTATCAA | UUAUCAA |
| | | | | | | | [SEQ ID NO: 956] | [SEQ ID NO: 1484] |
| TCCAGTTTCGGC | UCCAGUUUCGGC | AGCTCTGCTTTA | AGCUCUGCUUUA | AGCUCUGCUUGC | -4.91921 | 4356 | ACCGGACATACTTGTT | ACCGGACAUACUUGUU |
| AAGCAGAGCT | AAGCAGAGCU | CGAAACTGGT | CGAAACUGGU | CGAAACUG | | | CCACTCTCCAGTTTCG | CCACUCUCCAGUUUCG |
| [SEQ ID | [SEQ ID | [SEQ ID | [SEQ ID | [SEQ ID | | | GCAAGCAGAGCTTAGT | GCAAGCAGAGCUUAGU |
| NO: 725] | NO: 1253] | NO: 841] | NO: 1369] | NO: 1073] | | | GAAATATATATTAAAA | GAAAUAUAUAUUAAAA |
| | (same as | | | | | | GCTCTGCTTTACGAAA | GCUCUGCUUUACGAAA |
| | guide in XD- | | | | | | CTGGTTAGTGTGACAG | CUGGUUAGUGUGACAG |
| | 14861) | | | | | | GGATACAGCAACTATT | GGAUACAGCAACUAUU |
| | | | | | | | TTATCAA | UUAUCAA |
| | | | | | | | [SEQ ID NO: 957] | [SEQ ID NO: 1485] |
| TTCCAGTTTCGG | UUCCAGUUUCGG | GCTCTGCTTGAA | GCUCUGCUUGAA | GCUCUGCUUGCC | -4.12374 | 4357 | ACCGGACATACTTGTT | ACCGGACAUACUUGUU |
| CAAGCAGAGC | CAAGCAGAGC | GAAACTGGAT | GAAACUGGAU | GAAACUGG | | | CCACTCTTCCAGTTTC | CCACUCUUCCAGUUUC |
| [SEQ ID | [SEQ ID | [SEQ ID | [SEQ ID | [SEQ ID | | | GGCAAGCAGAGCTAGT | GGCAAGCAGAGCUAGU |
| NO: 726] | NO: 1254] | NO: 842] | NO: 1370] | NO: 1074] | | | GAAATATATATTAAAG | GAAAUAUAUAUUAAAG |
| | | | | | | | CTCTGCTTGAAGAAAC | CUCUGCUUGAAGAAAC |
| | | | | | | | TGGATTAGTGTGACAG | UGGAUUAGUGUGACAG |
| | | | | | | | GGATACAGCAACTATT | GGAUACAGCAACUAUU |
| | | | | | | | TTATCAA | UUAUCAA |
| | | | | | | | [SEQ ID NO: 958] | [SEQ ID NO: 1486] |
| TTTCCAGTTTCG | UUUCCAGUUUCG | CTCTGCTTGCAT | CUCUGCUUGCAU | CUCUGCUUGCCG | -4.13551 | 4358 | ACCGGACATACTTGTT | ACCGGACAUACUUGUU |
| GCAAGCAGAG | GCAAGCAGAG | AAACTGGAAT | AAACUGGAAU | AAACUGGA | | | CCACTCTTTCCAGTTT | CCACUCUUUCCAGUUU |
| [SEQ ID | [SEQ ID | [SEQ ID | [SEQ ID | [SEQ ID | | | CGGCAAGCAGAGTAGT | CGGCAAGCAGAGUAGU |
| NO: 727] | NO: 1255] | NO: 843] | NO: 1371] | NO: 1075] | | | GAAATATATATTAAAC | GAAAUAUAUAUUAAAC |
| | | | | | | | TCTGCTTGCATAAACT | UCUGCUUGCAUAAACU |
| | | | | | | | GGAATTAGTGTGACAG | GGAAUUAGUGUGACAG |
| | | | | | | | GGATACAGCAACTATT | GGAUACAGCAACUAUU |
| | | | | | | | TTATCAA | UUAUCAA |
| | | | | | | | [SEQ ID NO: 959] | [SEQ ID NO: 1487] |
| ACTTCCAGTTTC | ACUUCCAGUUUC | TCTGCTTGCCTG | UCUGCUUGCCUG | UCUGCUUGCCGA | -4.43988 | 4359 | ACCGGACATACTTGTT | ACCGGACAUACUUGUU |
| GGCAAGCAGA | GGCAAGCAGA | AACTGGAAGA | AACUGGAAGA | AACUGGAA | | | CCACTCACTTCCAGTT | CCACUCACUUCCAGUU |
| [SEQ ID | [SEQ ID | [SEQ ID | [SEQ ID | [SEQ ID | | | TCGGCAAGCAGATAGT | UCGGCAAGCAGAUAGU |
| NO: 728] | NO: 1256] | NO: 844] | NO: 1372] | NO: 1076] | | | GAAATATATATTAAAT | GAAAUAUAUAUUAAAU |
| | | | | | | | CTGCTTGCCTGAACTG | CUGCUUGCCUGAACUG |
| | | | | | | | GAAGATAGTGTGACAG | GAAGAUAGUGUGACAG |
| | | | | | | | GGATACAGCAACTATT | GGAUACAGCAACUAUU |
| | | | | | | | TTATCAA | UUAUCAA |
| | | | | | | | [SEQ ID NO: 960] | [SEQ ID NO: 1488] |
| AACTTCCAGTTT | AACUUCCAGUUU | CTGCTTGCCGGG | CUGCUUGCCGGG | CUGCUUGCCGAA | -3.57411 | 4360 | ACCGGACATACTTGTT | ACCGGACAUACUUGUU |
| CGGCAAGCAG | CGGCAAGCAG | ACTGGAAGTA | ACUGGAAGUA | ACUGGAAG | | | CCACTCAACTTCCAGT | CCACUCAACUUCCAGU |
| [SEQ ID | [SEQ ID | [SEQ ID | [SEQ ID | [SEQ ID | | | TTCGGCAAGCAGTAGT | UUCGGCAAGCAGUAGU |
| NO: 729] | NO: 1257] | NO: 845] | NO: 1373] | NO: 1077] | | | GAAATATATATTAAAC | GAAAUAUAUAUUAAAC |
| | | | | | | | TGCTTGCCGGGACTGG | UGCUUGCCGGGACUGG |
| | | | | | | | AAGTATAGTGTGACAG | AAGUAUAGUGUGACAG |
| | | | | | | | GGATACAGCAACTATT | GGAUACAGCAACUAUU |
| | | | | | | | TTATCAA | UUAUCAA |
| | | | | | | | [SEQ ID NO: 961] | [SEQ ID NO: 1489] |
| TAACTTCCAGTT | UAACUUCCAGUU | TGCTTGCCGAGG | UGCUUGCCGAGG | UGCUUGCCGAAA | -3.33142 | 4361 | ACCGGACATACTTGTT | ACCGGACAUACUUGUU |
| TCGGCAAGCA | UCGGCAAGCA | CTGGAAGTTT | CUGGAAGUUU | CUGGAAGU | | | CCACTCTAACTTCCAG | CCACUCUAACUUCCAG |
| [SEQ ID | [SEQ ID | [SEQ ID | [SEQ ID | [SEQ ID | | | TTTCGGCAAGCATAGT | UUUCGGCAAGCAUAGU |
| NO: 730] | NO: 1258] | NO: 846] | NO: 1374] | NO: 1078] | | | GAAATATATATTAAAT | GAAAUAUAUAUUAAAU |
| | | | | | | | GCTTGCCGAGGCTGGA | GCUUGCCGAGGCUGGA |
| | | | | | | | AGTTTTAGTGTGACAG | AGUUUUAGUGUGACAG |
| | | | | | | | GGATACAGCAACTATT | GGAUACAGCAACUAUU |
| | | | | | | | TTATCAA | UUAUCAA |
| | | | | | | | [SEQ ID NO: 962] | [SEQ ID NO: 1490] |
| ATAACTTCCAGT | AUAACUUCCAGU | GCTTGCCGAAGA | GCUUGCCGAAGA | GCUUGCCGAAAC | -3.93535 | 4362 | ACCGGACATACTTGTT | ACCGGACAUACUUGUU |
| TTCGGCAAGC | UUCGGCAAGC | TGGAAGTTAA | UGGAAGUUAA | UGGAAGUU | | | CCACTCATAACTTCCA | CCACUCAUAACUUCCA |
| [SEQ ID | [SEQ ID | [SEQ ID | [SEQ ID | [SEQ ID | | | GTTTCGGCAAGCTAGT | GUUUCGGCAAGCUAGU |
| NO: 731] | NO: 1259] | NO: 847] | NO: 1375] | NO: 1079] | | | GAAATATATATTAAAG | GAAAUAUAUAUUAAAG |
| | (same as | | | | | | CTTGCCGAAGATGGAA | CUUGCCGAAGAUGGAA |
| | guide in XD- | | | | | | GTTAATAGTGTGACAG | GUUAAUAGUGUGACAG |
| | 14932) | | | | | | GGATACAGCAACTATT | GGAUACAGCAACUAUU |
| | | | | | | | TTATCAA | UUAUCAA |
| | | | | | | | [SEQ ID NO: 963] | [SEQ ID NO: 1491] |
| AATAACTTCCAG | AAUAACUUCCAG | CTTGCCGAAAAC | CUUGCCGAAAAC | CUUGCCGAAACU | -3.56666 | 4363 | ACCGGACATACTTGTT | ACCGGACAUACUUGUU |
| TTTCGGCAAG | UUUCGGCAAG | GGAAGTTATA | GGAAGUUAUA | GGAAGUUA | | | CCACTCAATAACTTCC | CCACUCAAUAACUUCC |
| [SEQ ID | [SEQ ID | [SEQ ID | [SEQ ID | [SEQ ID | | | AGTTTCGGCAAGTAGT | AGUUUCGGCAAGUAGU |
| NO: 732] | NO: 1260] | NO: 848] | NO: 1376] | NO: 1080] | | | GAAATATATATTAAAC | GAAAUAUAUAUUAAAC |
| | | | | | | | TTGCCGAAAACGGAAG | UUGCCGAAAACGGAAG |
| | | | | | | | TTATATAGTGTGACAG | UUAUAUAGUGUGACAG |
| | | | | | | | GGATACAGCAACTATT | GGAUACAGCAACUAUU |
| | | | | | | | TTATCAA | UUAUCAA |
| | | | | | | | [SEQ ID NO: 964] | [SEQ ID NO: 1492] |
| AAATAACTTCCA | AAAUAACUUCCA | TTGCCGAAACCT | UUGCCGAAACCU | UUGCCGAAACUG | -2.9553 | 4364 | ACCGGACATACTTGTT | ACCGGACAUACUUGUU |
| GTTTCGGCAA | GUUUCGGCAA | GAAGTTATTA | GAAGUUAUUA | GAAGUUAU | | | CCACTCAAATAACTTC | CCACUCAAAUAACUUC |
| [SEQ ID | [SEQ ID | [SEQ ID | [SEQ ID | [SEQ ID | | | CAGTTTCGGCAATAGT | CAGUUUCGGCAAUAGU |
| NO: 733] | NO: 1261] | NO: 849] | NO: 1377] | NO: 1081] | | | GAAATATATATTAAAT | GAAAUAUAUAUUAAAU |
| | | | | | | | TGCCGAAACCTGAAGT | UGCCGAAACCUGAAGU |
| | | | | | | | TATTATAGTGTGACAG | UAUUAUAGUGUGACAG |
| | | | | | | | GGATACAGCAACTATT | GGAUACAGCAACUAUU |
| | | | | | | | TTATCAA | UUAUCAA |
| | | | | | | | [SEQ ID NO: 965] | [SEQ ID NO: 1493] |
| ATAAATAACTTC | AUAAAUAACUUC | GCCGAAACTGTG | GCCGAAACUGUG | GCCGAAACUGGA | -3.3862 | 4366 | ACCGGACATACTTGTT | ACCGGACAUACUUGUU |
| CAGTTTCGGC | CAGUUUCGGC | AGTTATTTAA | AGUUAUUUAA | AGUUAUUU | | | CCACTCATAAATAACT | CCACUCAUAAAUAACU |
| [SEQ ID | [SEQ ID | [SEQ ID | [SEQ ID | [SEQ ID | | | TCCAGTTTCGGCTAGT | UCCAGUUUCGGCUAGU |
| NO: 734] | NO: 1262] | NO: 850] | NO: 1378] | NO: 1082] | | | GAAATATATATTAAAG | GAAAUAUAUAUUAAAG |
| | | | | | | | CCGAAACTGTGAGTTA | CCGAAACUGUGAGUUA |
| | | | | | | | TTTAATAGTGTGACAG | UUUAAUAGUGUGACAG |
| | | | | | | | GGATACAGCAACTATT | GGAUACAGCAACUAUU |
| | | | | | | | TTATCAA | UUAUCAA |
| | | | | | | | [SEQ ID NO: 966] | [SEQ ID NO: 1494] |
| AATAAATAACTT | AAUAAAUAACUU | CCGAAACTGGGG | CCGAAACUGGGG | CCGAAACUGGAA | -3.45626 | 4367 | ACCGGACATACTTGTT | ACCGGACAUACUUGUU |
| CCAGTTTCGG | CCAGUUUCGG | GTTATTTATA | GUUAUUUAUA | GUUAUUUA | | | CCACTCAATAAATAAC | CCACUCAAUAAAUAAC |
| [SEQ ID | [SEQ ID | [SEQ ID | [SEQ ID | [SEQ ID | | | TTCCAGTTTCGGTAGT | UUCCAGUUUCGGUAGU |
| NO: 735] | NO: 1263] | NO: 851] | NO: 1379] | NO: 1083] | | | GAAATATATATTAAAC | GAAAUAUAUAUUAAAC |
| | | | | | | | CGAAACTGGGGGTTAT | CGAAACUGGGGGUUAU |
| | | | | | | | TTATATAGTGTGACAG | UUAUAUAGUGUGACAG |
| | | | | | | | GGATACAGCAACTATT | GGAUACAGCAACUAUU |
| | | | | | | | TTATCAA | UUAUCAA |
| | | | | | | | [SEQ ID NO: 967] | [SEQ ID NO: 1495] |
| AAATAAATAACT | AAAUAAAUAACU | CGAAACTGGAGT | CGAAACUGGAGU | CGAAACUGGAAG | -1.76663 | 4368 | ACCGGACATACTTGTT | ACCGGACAUACUUGUU |
| TCCAGTTTCG | UCCAGUUUCG | TTATTTATTA | UUAUUUAUUA | UUAUUUAU | | | CCACTCAAATAAATAA | CCACUCAAAUAAAUAA |
| [SEQ ID | [SEQ ID | [SEQ ID | [SEQ ID | [SEQ ID | | | CTTCCAGTTTCGTAGT | CUUCCAGUUUCGUAGU |
| NO: 736] | NO: 1264] | NO: 852] | NO: 1380] | NO: 1084] | | | GAAATATATATTAAAC | GAAAUAUAUAUUAAAC |
| | | | | | | | GAAACTGGAGTTTATT | GAAACUGGAGUUUAUU |
| | | | | | | | TATTATAGTGTGACAG | UAUUAUAGUGUGACAG |
| | | | | | | | GGATACAGCAACTATT | GGAUACAGCAACUAUU |
| | | | | | | | TTATCAA | UUAUCAA |
| | | | | | | | [SEQ ID NO: 968] | [SEQ ID NO: 1496] |
| AAAATAAATAAC | AAAAUAAAUAAC | GAAACTGGAATC | GAAACUGGAAUC | GAAACUGGAAGU | -0.22922 | 4369 | ACCGGACATACTTGTT | ACCGGACAUACUUGUU |
| TTCCAGTTTC | UUCCAGUUUC | TATTTATTTA | UAUUUAUUUA | UAUUUAUU | | | CCACTCAAAATAAATA | CCACUCAAAAUAAAUA |
| [SEQ ID | [SEQ ID | [SEQ ID | [SEQ ID | [SEQ ID | | | ACTTCCAGTTTCTAGT | ACUUCCAGUUUCUAGU |
| NO: 737] | NO: 1265] | NO: 853] | NO: 1381] | NO: 1085] | | | GAAATATATATTAAAG | GAAAUAUAUAUUAAAG |
| | | | | | | | AAACTGGAATCTATTT | AAACUGGAAUCUAUUU |
| | | | | | | | ATTTATAGTGTGACAG | AUUUAUAGUGUGACAG |
| | | | | | | | GGATACAGCAACTATT | GGAUACAGCAACUAUU |
| | | | | | | | TTATCAA | UUAUCAA |
| | | | | | | | [SEQ ID NO: 969] | [SEQ ID NO: 1497] |
| AAAAATAAATAA | AAAAAUAAAUAA | AAACTGGAAGCC | AAACUGGAAGCC | AAACUGGAAGUU | -0.00312 | 4370 | ACCGGACATACTTGTT | ACCGGACAUACUUGUU |
| CTTCCAGTTT | CUUCCAGUUU | ATTTATTTTA | AUUUAUUUUA | AUUUAUUU | | | CCACTCAAAAATAAAT | CCACUCAAAAAUAAAU |
| [SEQ ID | [SEQ ID | [SEQ ID | [SEQ ID | [SEQ ID | | | AACTTCCAGTTTTAGT | AACUUCCAGUUUUAGU |
| NO: 738] | NO: 1266] | NO: 854] | NO: 1382] | NO: 1086] | | | GAAATATATATTAAAA | GAAAUAUAUAUUAAAA |
| | | | | | | | AACTGGAAGCCATTTA | AACUGGAAGCCAUUUA |
| | | | | | | | TTTTATAGTGTGACAG | UUUUAUAGUGUGACAG |
| | | | | | | | GGATACAGCAACTATT | GGAUACAGCAACUAUU |
| | | | | | | | TTATCAA | UUAUCAA |
| | | | | | | | [SEQ ID NO: 970] | [SEQ ID NO: 1498] |
| ATGACTTTCAAG | AUGACUUUCAAG | TTTAATAACCAC | UUUAAUAACCAC | UUUAAUAACCCU | -2.77085 | 4390 | ACCGGACATACTTGTT | ACCGGACAUACUUGUU |
| GGTTATTAAA | GGUUAUUAAA | TGAAAGTCAA | UGAAAGUCAA | UGAAAGUC | | | CCACTCATGACTTTCA | CCACUCAUGACUUUCA |
| [SEQ ID | [SEQ ID | [SEQ ID | [SEQ ID | [SEQ ID | | | AGGGTTATTAAATAGT | AGGGUUAUUAAAUAGU |
| NO: 739] | NO: 1267] | NO: 855] | NO: 1383] | NO: 1087] | | | GAAATATATATTAAAT | GAAAUAUAUAUUAAAU |
| | | | | | | | TTAATAACCACTGAAA | UUAAUAACCACUGAAA |
| | | | | | | | GTCAATAGTGTGACAG | GUCAAUAGUGUGACAG |
| | | | | | | | GGATACAGCAACTATT | GGAUACAGCAACUAUU |
| | | | | | | | TTATCAA | UUAUCAA |
| | | | | | | | [SEQ ID NO: 971] | [SEQ ID NO: 1499] |
| TATGACTTTCAA | UAUGACUUUCAA | TTAATAACCCCC | UUAAUAACCCCC | UUAAUAACCCUU | -3.75832 | 4391 | ACCGGACATACTTGTT | ACCGGACAUACUUGUU |
| GGGTTATTAA | GGGUUAUUAA | GAAAGTCATT | GAAAGUCAUU | GAAAGUCA | | | CCACTCTATGACTTTC | CCACUCUAUGACUUUC |
| [SEQ ID | [SEQ ID | [SEQ ID | [SEQ ID | [SEQ ID | | | AAGGGTTATTAATAGT | AAGGGUUAUUAAUAGU |
| NO: 740] | NO: 1268] | NO: 856] | NO: 1384] | NO: 1088] | | | GAAATATATATTAAAT | GAAAUAUAUAUUAAAU |
| | | | | | | | TAATAACCCCCGAAAG | UAAUAACCCCCGAAAG |
| | | | | | | | TCATTTAGTGTGACAG | UCAUUUAGUGUGACAG |
| | | | | | | | GGATACAGCAACTATT | GGAUACAGCAACUAUU |
| | | | | | | | TTATCAA | UUAUCAA |
| | | | | | | | [SEQ ID NO: 972] | [SEQ ID NO: 1500] |
| TCATGACTTTCA | UCAUGACUUUCA | TAATAACCCTCT | UAAUAACCCUCU | UAAUAACCCUUG | -4.61593 | 4392 | ACCGGACATACTTGTT | ACCGGACAUACUUGUU |
| AGGGTTATTA | AGGGUUAUUA | AAAGTCATGT | AAAGUCAUGU | AAAGUCAU | | | CCACTCTCATGACTTT | CCACUCUCAUGACUUU |
| [SEQ ID | [SEQ ID | [SEQ ID | [SEQ ID | [SEQ ID | | | CAAGGGTTATTATAGT | CAAGGGUUAUUAUAGU |
| NO: 741] | NO: 1269] | NO: 857] | NO: 1385] | NO: 1089] | | | GAAATATATATTAAAT | GAAAUAUAUAUUAAAU |
| | (same as | | | | | | AATAACCCTCTAAAGT | AAUAACCCUCUAAAGU |
| | guide in XD- | | | | | | CATGTTAGTGTGACAG | CAUGUUAGUGUGACAG |
| | 14933) | | | | | | GGATACAGCAACTATT | GGAUACAGCAACUAUU |
| | | | | | | | TTATCAA | UUAUCAA |
| | | | | | | | [SEQ ID NO: 973] | [SEQ ID NO: 1501] |
| TTCATGACTTTC | UUCAUGACUUUC | AATAACCCTTTG | AAUAACCCUUUG | AAUAACCCUUGA | -3.88921 | 4393 | ACCGGACATACTTGTT | ACCGGACAUACUUGUU |
| AAGGGTTATT | AAGGGUUAUU | AAGTCATGAT | AAGUCAUGAU | AAGUCAUG | | | CCACTCTTCATGACTT | CCACUCUUCAUGACUU |
| [SEQ ID | [SEQ ID | [SEQ ID | [SEQ ID | [SEQ ID | | | TCAAGGGTTATTTAGT | UCAAGGGUUAUUUAGU |
| NO: 742] | NO: 1270] | NO: 858] | NO: 1386] | NO: 1090] | | | GAAATATATATTAAAA | GAAAUAUAUAUUAAAA |
| | | | | | | | ATAACCCTTTGAAGTC | AUAACCCUUUGAAGUC |
| | | | | | | | ATGATTAGTGTGACAG | AUGAUUAGUGUGACAG |
| | | | | | | | GGATACAGCAACTATT | GGAUACAGCAACUAUU |
| | | | | | | | TTATCAA | UUAUCAA |
| | | | | | | | [SEQ ID NO: 974] | [SEQ ID NO: 1502] |
| TTTCATGACTTT | UUUCAUGACUUU | ATAACCCTTGGG | AUAACCCUUGGG | AUAACCCUUGAA | -3.57278 | 4394 | ACCGGACATACTTGTT | ACCGGACAUACUUGUU |
| CAAGGGTTAT | CAAGGGUUAU | AGTCATGAAT | AGUCAUGAAU | AGUCAUGA | | | CCACTCTTTCATGACT | CCACUCUUUCAUGACU |
| [SEQ ID | [SEQ ID | [SEQ ID | [SEQ ID | [SEQ ID | | | TTCAAGGGTTATTAGT | UUCAAGGGUUAUUAGU |
| NO: 743] | NO: 1271] | NO: 859] | NO: 1387] | NO: 1091] | | | GAAATATATATTAAAA | GAAAUAUAUAUUAAAA |
| | | | | | | | TAACCCTTGGGAGTCA | UAACCCUUGGGAGUCA |
| | | | | | | | TGAATTAGTGTGACAG | UGAAUUAGUGUGACAG |
| | | | | | | | GGATACAGCAACTATT | GGAUACAGCAACUAUU |
| | | | | | | | TTATCAA | UUAUCAA |
| | | | | | | | [SEQ ID NO: 975] | [SEQ ID NO: 1503] |
| TGTTCATGACTT | UGUUCAUGACUU | TAACCCTTGAGG | UAACCCUUGAGG | UAACCCUUGAAA | -4.31654 | 4395 | ACCGGACATACTTGTT | ACCGGACAUACUUGUU |
| TCAAGGGTTA | UCAAGGGUUA | GTCATGAACT | GUCAUGAACU | GUCAUGAA | | | CCACTCTGTTCATGAC | CCACUCUGUUCAUGAC |
| [SEQ ID | [SEQ ID | [SEQ ID | [SEQ ID | [SEQ ID | | | TTTCAAGGGTTATAGT | UUUCAAGGGUUAUAGU |
| NO: 744] | NO: 1272] | NO: 860] | NO: 1388] | NO: 1092] | | | GAAATATATATTAAAT | GAAAUAUAUAUUAAAU |
| | | | | | | | AACCCTTGAGGGTCAT | AACCCUUGAGGGUCAU |
| | | | | | | | GAACTTAGTGTGACAG | GAACUUAGUGUGACAG |
| | | | | | | | GGATACAGCAACTATT | GGAUACAGCAACUAUU |
| | | | | | | | TTATCAA | UUAUCAA |
| | | | | | | | [SEQ ID NO: 976] | [SEQ ID NO: 1504] |
| TTGTTCATGACT | UUGUUCAUGACU | AACCCTTGAAGT | AACCCUUGAAGU | AACCCUUGAAAG | -3.76092 | 4396 | ACCGGACATACTTGTT | ACCGGACAUACUUGUU |
| TTCAAGGGTT | UUCAAGGGUU | TCATGAACAT | UCAUGAACAU | UCAUGAAC | | | CCACTCTTGTTCATGA | CCACUCUUGUUCAUGA |
| [SEQ ID | [SEQ ID | [SEQ ID | [SEQ ID | [SEQ ID | | | CTTTCAAGGGTTTAGT | CUUUCAAGGGUUUAGU |
| NO: 745] | NO: 1273] | NO: 861] | NO: 1389] | NO: 1093] | | | GAAATATATATTAAAA | GAAAUAUAUAUUAAAA |
| | | | | | | | ACCCTTGAAGTTCATG | ACCCUUGAAGUUCAUG |
| | | | | | | | AACATTAGTGTGACAG | AACAUUAGUGUGACAG |
| | | | | | | | GGATACAGCAACTATT | GGAUACAGCAACUAUU |
| | | | | | | | TTATCAA | UUAUCAA |
| | | | | | | | [SEQ ID NO: 977] | [SEQ ID NO: 1505] |
| TGTGTTCATGAC | UGUGUUCAUGAC | ACCCTTGAAATC | ACCCUUGAAAUC | ACCCUUGAAAGU | -4.07971 | 4397 | ACCGGACATACTTGTT | ACCGGACAUACUUGUU |
| TTTCAAGGGT | UUUCAAGGGU | CATGAACACT | CAUGAACACU | CAUGAACA | | | CCACTCTGTGTTCATG | CCACUCUGUGUUCAUG |
| [SEQ ID | [SEQ ID | [SEQ ID | [SEQ ID | [SEQ ID | | | ACTTTCAAGGGTTAGT | ACUUUCAAGGGUUAGU |
| NO: 746] | NO: 1274] | NO: 862] | NO: 1390] | NO: 1094] | | | GAAATATATATTAAAA | GAAAUAUAUAUUAAAA |
| | | | | | | | CCCTTGAAATCCATGA | CCCUUGAAAUCCAUGA |
| | | | | | | | ACACTTAGTGTGACAG | ACACUUAGUGUGACAG |
| | | | | | | | GGATACAGCAACTATT | GGAUACAGCAACUAUU |
| | | | | | | | TTATCAA | UUAUCAA |
| | | | | | | | [SEQ ID NO: 978] | [SEQ ID NO: 1506] |
| ATGTGTTCATGA | AUGUGUUCAUGA | CCCTTGAAAGCA | CCCUUGAAAGCA | CCCUUGAAAGUC | -4.76135 | 4398 | ACCGGACATACTTGTT | ACCGGACAUACUUGUU |
| CTTTCAAGGG | CUUUCAAGGG | ATGAACACAA | AUGAACACAA | AUGAACAC | | | CCACTCATGTGTTCAT | CCACUCAUGUGUUCAU |
| [SEQ ID | [SEQ ID | [SEQ ID | [SEQ ID | [SEQ ID | | | GACTTTCAAGGGTAGT | GACUUUCAAGGGUAGU |
| NO: 747] | NO: 1275] | NO: 863] | NO: 1391] | NO: 1095] | | | GAAATATATATTAAAC | GAAAUAUAUAUUAAAC |
| | | | | | | | CCTTGAAAGCAATGAA | CCUUGAAAGCAAUGAA |
| | | | | | | | CACAATAGTGTGACAG | CACAAUAGUGUGACAG |
| | | | | | | | GGATACAGCAACTATT | GGAUACAGCAACUAUU |
| | | | | | | | TTATCAA | UUAUCAA |
| | | | | | | | [SEQ ID NO: 979] | [SEQ ID NO: 1507] |
| TATGTGTTCATG | UAUGUGUUCAUG | CCTTGAAAGTAG | CCUUGAAAGUAG | CCUUGAAAGUCA | -4.33797 | 4399 | ACCGGACATACTTGTT | ACCGGACAUACUUGUU |
| ACTTTCAAGG | ACUUUCAAGG | TGAACACATT | UGAACACAUU | UGAACACA | | | CCACTCTATGTGTTCA | CCACUCUAUGUGUUCA |
| [SEQ ID | [SEQ ID | [SEQ ID | [SEQ ID | [SEQ ID | | | TGACTTTCAAGGTAGT | UGACUUUCAAGGUAGU |
| NO: 748] | NO: 1276] | NO: 864] | NO: 1392] | NO: 1096] | | | GAAATATATATTAAAC | GAAAUAUAUAUUAAAC |
| | | | | | | | CTTGAAAGTAGTGAAC | CUUGAAAGUAGUGAAC |
| | | | | | | | ACATTTAGTGTGACAG | ACAUUUAGUGUGACAG |
| | | | | | | | GGATACAGCAACTATT | GGAUACAGCAACUAUU |
| | | | | | | | TTATCAA | UUAUCAA |
| | | | | | | | [SEQ ID NO: 980] | [SEQ ID NO: 1508] |
| TGATGTGTTCAT | UGAUGUGUUCAU | CTTGAAAGTCGC | CUUGAAAGUCGC | CUUGAAAGUCAU | -4.13084 | 4400 | ACCGGACATACTTGTT | ACCGGACAUACUUGUU |
| GACTTTCAAG | GACUUUCAAG | GAACACATCT | GAACACAUCU | GAACACAU | | | CCACTCTGATGTGTTC | CCACUCUGAUGUGUUC |
| [SEQ ID | [SEQ ID | [SEQ ID | [SEQ ID | [SEQ ID | | | ATGACTTTCAAGTAGT | AUGACUUUCAAGUAGU |
| NO: 749] | NO: 1277] | NO: 865] | NO: 1393] | NO: 1097] | | | GAAATATATATTAAAC | GAAAUAUAUAUUAAAC |
| | | | | | | | TTGAAAGTCGCGAACA | UUGAAAGUCGCGAACA |
| | | | | | | | CATCTTAGTGTGACAG | CAUCUUAGUGUGACAG |
| | | | | | | | GGATACAGCAACTATT | GGAUACAGCAACUAUU |
| | | | | | | | TTATCAA | UUAUCAA |
| | | | | | | | [SEQ ID NO: 981] | [SEQ ID NO: 1509] |
| TTGATGTGTTCA | UUGAUGUGUUCA | TTGAAAGTCACT | UUGAAAGUCACU | UUGAAAGUCAUG | -4.24964 | 4401 | ACCGGACATACTTGTT | ACCGGACAUACUUGUU |
| TGACTTTCAA | UGACUUUCAA | AACACATCAT | AACACAUCAU | AACACAUC | | | CCACTCTTGATGTGTT | CCACUCUUGAUGUGUU |
| [SEQ ID | [SEQ ID | [SEQ ID | [SEQ ID | [SEQ ID | | | CATGACTTTCAATAGT | CAUGACUUUCAAUAGU |
| NO: 750] | NO: 1278] | NO: 866] | NO: 1394] | NO: 1098] | | | GAAATATATATTAAAT | GAAAUAUAUAUUAAAU |
| | | | | | | | TGAAAGTCACTAACAC | UGAAAGUCACUAACAC |
| | | | | | | | ATCATTAGTGTGACAG | AUCAUUAGUGUGACAG |
| | | | | | | | GGATACAGCAACTATT | GGAUACAGCAACUAUU |
| | | | | | | | TTATCAA | UUAUCAA |
| | | | | | | | [SEQ ID NO: 982] | [SEQ ID NO: 1510] |
| TCTGATGTGTTC | UCUGAUGUGUUC | TGAAAGTCATTG | UGAAAGUCAUUG | UGAAAGUCAUGA | -4.95673 | 4402 | ACCGGACATACTTGTT | ACCGGACAUACUUGUU |
| ATGACTTTCA | AUGACUUUCA | ACACATCAGT | ACACAUCAGU | ACACAUCA | | | CCACTCTCTGATGTGT | CCACUCUCUGAUGUGU |
| [SEQ ID | [SEQ ID | [SEQ ID | [SEQ ID | [SEQ ID | | | TCATGACTTTCATAGT | UCAUGACUUUCAUAGU |
| NO: 751] | NO: 1279] | NO: 867] | NO: 1395] | NO: 1099] | | | GAAATATATATTAAAT | GAAAUAUAUAUUAAAU |
| | | | | | | | GAAAGTCATTGACACA | GAAAGUCAUUGACACA |
| | | | | | | | TCAGTTAGTGTGACAG | UCAGUUAGUGUGACAG |
| | | | | | | | GGATACAGCAACTATT | GGAUACAGCAACUAUU |
| | | | | | | | TTATCAA | UUAUCAA |
| | | | | | | | [SEQ ID NO: 983] | [SEQ ID NO: 1511] |
| AGCTGATGTGTT | AGCUGAUGUGUU | GAAAGTCATGGG | GAAAGUCAUGGG | GAAAGUCAUGAA | -3.87865 | 4403 | ACCGGACATACTTGTT | ACCGGACAUACUUGUU |
| CATGACTTTC | CAUGACUUUC | CACATCAGCA | CACAUCAGCA | CACAUCAG | | | CCACTCAGCTGATGTG | CCACUCAGCUGAUGUG |
| [SEQ ID | [SEQ ID | [SEQ ID | [SEQ ID | [SEQ ID | | | TTCATGACTTTCTAGT | UUCAUGACUUUCUAGU |
| NO: 752] | NO: 1280] | NO: 868] | NO: 1396] | NO: 1100] | | | GAAATATATATTAAAG | GAAAUAUAUAUUAAAG |
| | | | | | | | AAAGTCATGGGCACAT | AAAGUCAUGGGCACAU |
| | | | | | | | CAGCATAGTGTGACAG | CAGCAUAGUGUGACAG |
| | | | | | | | GGATACAGCAACTATT | GGAUACAGCAACUAUU |
| | | | | | | | TTATCAA | UUAUCAA |
| | | | | | | | [SEQ ID NO: 984] | [SEQ ID NO: 1512] |
| TAGCTGATGTGT | UAGCUGAUGUGU | AAAGTCATGAGA | AAAGUCAUGAGA | AAAGUCAUGAAC | -3.03908 | 4404 | ACCGGACATACTTGTT | ACCGGACAUACUUGUU |
| TCATGACTTT | UCAUGACUUU | ACATCAGCTT | ACAUCAGCUU | ACAUCAGC | | | CCACTCTAGCTGATGT | CCACUCUAGCUGAUGU |
| [SEQ ID | [SEQ ID | [SEQ ID | [SEQ ID | [SEQ ID | | | GTTCATGACTTTTAGT | GUUCAUGACUUUUAGU |
| NO: 753] | NO: 1281] | NO: 869] | NO: 1397] | NO: 1101] | | | GAAATATATATTAAAA | GAAAUAUAUAUUAAAA |
| | | | | | | | AAGTCATGAGAACATC | AAGUCAUGAGAACAUC |
| | | | | | | | AGCTTTAGTGTGACAG | AGCUUUAGUGUGACAG |
| | | | | | | | GGATACAGCAACTATT | GGAUACAGCAACUAUU |
| | | | | | | | TTATCAA | UUAUCAA |
| | | | | | | | [SEQ ID NO: 985] | [SEQ ID NO: 1513] |
| TTAGCTGATGTG | UUAGCUGAUGUG | AAGTCATGAAAG | AAGUCAUGAAAG | AAGUCAUGAACA | -4. 75357 | 4405 | ACCGGACATACTTGTT | ACCGGACAUACUUGUU |
| TTCATGACTT | UUCAUGACUU | CATCAGCTAT | CAUCAGCUAU | CAUCAGCU | | | CCACTCTTAGCTGATG | CCACUCUUAGCUGAUG |
| [SEQ ID | [SEQ ID | [SEQ ID | [SEQ ID | [SEQ ID | | | TGTTCATGACTTTAGT | UGUUCAUGACUUUAGU |
| NO: 754] | NO: 1282] | NO: 870] | NO: 1398] | NO: 1102] | | | GAAATATATATTAAAA | GAAAUAUAUAUUAAAA |
| | | | | | | | AGTCATGAAAGCATCA | AGUCAUGAAAGCAUCA |
| | | | | | | | GCTATTAGTGTGACAG | GCUAUUAGUGUGACAG |
| | | | | | | | GGATACAGCAACTATT | GGAUACAGCAACUAUU |
| | | | | | | | TTATCAA | UUAUCAA |
| | | | | | | | [SEQ ID NO: 986] | [SEQ ID NO: 1514] |
| TCTAGCTGATGT | UCUAGCUGAUGU | AGTCATGAACGA | AGUCAUGAACGA | AGUCAUGAACAC | -5.05901 | 4406 | ACCGGACATACTTGTT | ACCGGACAUACUUGUU |
| GTTCATGACT | GUUCAUGACU | ATCAGCTAGT | AUCAGCUAGU | AUCAGCUA | | | CCACTCTCTAGCTGAT | CCACUCUCUAGCUGAU |
| [SEQ ID | [SEQ ID | [SEQ ID | [SEQ ID | [SEQ ID | | | GTGTTCATGACTTAGT | GUGUUCAUGACUUAGU |
| NO: 755] | NO: 1283] | NO: 871] | NO: 1399] | NO: 1103] | | | GAAATATATATTAAAA | GAAAUAUAUAUUAAAA |
| | | | | | | | GTCATGAACGAATCAG | GUCAUGAACGAAUCAG |
| | | | | | | | CTAGTTAGTGTGACAG | CUAGUUAGUGUGACAG |
| | | | | | | | GGATACAGCAACTATT | GGAUACAGCAACUAUU |
| | | | | | | | TTATCAA | UUAUCAA |
| | | | | | | | [SEQ ID NO: 987] | [SEQ ID NO: 1515] |
| TGCTAGCTGATG | UGCUAGCUGAUG | GTCATGAACAAG | GUCAUGAACAAG | GUCAUGAACACA | -4.47567 | 4407 | ACCGGACATACTTGTT | ACCGGACAUACUUGUU |
| TGTTCATGAC | UGUUCAUGAC | TCAGCTAGCT | UCAGCUAGCU | UCAGCUAG | | | CCACTCTGCTAGCTGA | CCACUCUGCUAGCUGA |
| [SEQ ID | [SEQ ID | [SEQ ID | [SEQ ID | [SEQ ID | | | TGTGTTCATGACTAGT | UGUGUUCAUGACUAGU |
| NO: 756] | NO: 1284] | NO: 872] | NO: 1400] | NO: 1104] | | | GAAATATATATTAAAG | GAAAUAUAUAUUAAAG |
| | | | | | | | TCATGAACAAGTCAGC | UCAUGAACAAGUCAGC |
| | | | | | | | TAGCTTAGTGTGACAG | UAGCUUAGUGUGACAG |
| | | | | | | | GGATACAGCAACTATT | GGAUACAGCAACUAUU |
| | | | | | | | TTATCAA | UUAUCAA |
| | | | | | | | [SEQ ID NO: 988] | [SEQ ID NO: 1516] |
| TTGCTAGCTGAT | UUGCUAGCUGAU | TCATGAACACGC | UCAUGAACACGC | UCAUGAACACAU | -4.42302 | 4408 | ACCGGACATACTTGTT | ACCGGACAUACUUGUU |
| GTGTTCATGA | GUGUUCAUGA | CAGCTAGCAT | CAGCUAGCAU | CAGCUAGC | | | CCACTCTTGCTAGCTG | CCACUCUUGCUAGCUG |
| [SEQ ID | [SEQ ID | [SEQ ID | [SEQ ID | [SEQ ID | | | ATGTGTTCATGATAGT | AUGUGUUCAUGAUAGU |
| NO: 757] | NO: 1285] | NO: 873] | NO: 1401] | NO: 1105] | | | GAAATATATATTAAAT | GAAAUAUAUAUUAAAU |
| | | | | | | | CATGAACACGCCAGCT | CAUGAACACGCCAGCU |
| | | | | | | | AGCATTAGTGTGACAG | AGCAUUAGUGUGACAG |
| | | | | | | | GGATACAGCAACTATT | GGAUACAGCAACUAUU |
| | | | | | | | TTATCAA | UUAUCAA |
| | | | | | | | [SEQ ID NO: 989] | [SEQ ID NO: 1517] |
| TTTGCTAGCTGA | UUUGCUAGCUGA | CATGAACACACA | CAUGAACACACA | CAUGAACACAUC | -5.35102 | 4409 | ACCGGACATACTTGTT | ACCGGACAUACUUGUU |
| TGTGTTCATG | UGUGUUCAUG | AGCTAGCAAT | AGCUAGCAAU | AGCUAGCA | | | CCACTCTTTGCTAGCT | CCACUCUUUGCUAGCU |
| [SEQ ID | [SEQ ID | [SEQ ID | [SEQ ID | [SEQ ID | | | GATGTGTTCATGTAGT | GAUGUGUUCAUGUAGU |
| NO: 758] | NO: 1286] | NO: 874 ] | NO: 1402] | NO: 1106] | | | GAAATATATATTAAAC | GAAAUAUAUAUUAAAC |
| | (same as | | | | | | ATGAACACACAAGCTA | AUGAACACACAAGCUA |
| | guide in XD- | | | | | | GCAATTAGTGTGACAG | GCAAUUAGUGUGACAG |
| | 14934) | | | | | | GGATACAGCAACTATT | GGAUACAGCAACUAUU |
| | | | | | | | TTATCAA | UUAUCAA |
| | | | | | | | [SEQ ID NO: 990] | [SEQ ID NO: 1518] |
| TTTTGCTAGCTG | UUUUGCUAGCUG | ATGAACACATAG | AUGAACACAUAG | AUGAACACAUCA | -0.73644 | 4410 | ACCGGACATACTTGTT | ACCGGACAUACUUGUU |
| ATGTGTTCAT | AUGUGUUCAU | GCTAGCAAAT | GCUAGCAAAU | GCUAGCAA | | | CCACTCTTTTGCTAGC | CCACUCUUUUGCUAGC |
| [SEQ ID | [SEQ ID | [SEQ ID | [SEQ ID | [SEQ ID | | | TGATGTGTTCATTAGT | UGAUGUGUUCAUUAGU |
| NO: 759] | NO: 1287] | NO: 875] | NO: 1403] | NO: 1107] | | | GAAATATATATTAAAA | GAAAUAUAUAUUAAAA |
| | | | | | | | TGAACACATAGGCTAG | UGAACACAUAGGCUAG |
| | | | | | | | CAAATTAGTGTGACAG | CAAAUUAGUGUGACAG |
| | | | | | | | GGATACAGCAACTATT | GGAUACAGCAACUAUU |
| | | | | | | | TTATCAA | UUAUCAA |
| | | | | | | | [SEQ ID NO: 991] | [SEQ ID NO: 1519] |
| TCTTTTGCTAGC | UCUUUUGCUAGC | GAACACATCATA | GAACACAUCAUA | GAACACAUCAGC | -1.29476 | 4412 | ACCGGACATACTTGTT | ACCGGACAUACUUGUU |
| TGATGTGTTC | UGAUGUGUUC | TAGCAAAAGT | UAGCAAAAGU | UAGCAAAA | | | CCACTCTCTTTTGCTA | CCACUCUCUUUUGCUA |
| [SEQ ID | [SEQ ID | [SEQ ID | [SEQ ID | [SEQ ID | | | GCTGATGTGTTCTAGT | GCUGAUGUGUUCUAGU |
| NO: 760] | NO: 1288] | NO: 876] | NO: 1404] | NO: 1108] | | | GAAATATATATTAAAG | GAAAUAUAUAUUAAAG |
| | | | | | | | AACACATCATATAGCA | AACACAUCAUAUAGCA |
| | | | | | | | AAAGTTAGTGTGACAG | AAAGUUAGUGUGACAG |
| | | | | | | | GGATACAGCAACTATT | GGAUACAGCAACUAUU |
| | | | | | | | TTATCAA | UUAUCAA |
| | | | | | | | [SEQ ID NO: 992] | [SEQ ID NO: 1520] |
| TGTCAAGTTTAG | | CGCCCTTTTAAC | | CGCCCUUUUACU | -4.72 | 4502 | ACCGGACATACTTGTT | |
| TAAAAGGGCG | | AAACTTGACT | | AAACUUGA | | | CCACTCTGTCAAGTTT | |
| [SEQ ID | | [SEQ ID | | [SEQ ID | | | AGTAAAAGGGCGTAGT | |
| NO: 2269] | | NO: 2270] | | NO: 2271] | | | GAAATATATATTAAAC | |
| | | | | | | | GCCCTTTTAACAAACT | |
| | | | | | | | TGACTTAGTGTGACAG | |
| | | | | | | | GGATACAGCAACTATT | |
| | | | | | | | TTATCAA | |
| | | | | | | | [SEQ ID NO: 2272] | |

### Example 3: Testing of Top Hits from Pooled Screen in Lentiviral Transduction of Human Neurons

[0405] Several top hits from pooled Deep Screen 1 (Example 2) were cloned into lentiviral vectors, packaged, and tested in stem-cell derived motor neuron cultures for knockdown of ATXN2 mRNA and protein. An example lentiviral vector is given in H1-miR-16-2_1755-AMELY_V1_CMV_GFP_lenti (SEQ ID NO:1521) which contains a amiRNA targeting position 1755 of ATXN2 transcript embedded in a miR-16-2 backbone, or the other vectors described here. The amiRNA sequence in the vector (e.g., nucleotides 1889-2020 of SEQ ID NO:1521) may replaced with the corresponding amiR or control non-miRNA sequence (MCS) but the rest of the vector is left unchanged.) Characterization of motor neurons (FIG. 29) shows that cultures (differentiation protocol described in below methods) generated cultures enriched for motor neurons, with elaborated neuronal processes. amiRNAs were embedded in lentiviral vectors (FIG. 30A) with an H1 promoter as well as a GFP expression cassette. In a first experiment, two amiRNAs, targeting ATXN2 at position 1784 (guide sequence SEQ ID NO:112) in the coding sequence or ATXN2 at position 4402 (guide sequence SEQ ID NO:1279) having miR-16-2 backbones were tested at two different doses. Strong knockdown of ATXN2 mRNA and protein was detected by qPCR analysis of mRNA and Western analysis of protein, respectively (FIGS. 30B-30C). Protein levels as measured in this assay showed a greater fractional reduction of protein levels than mRNA levels, indicating that measurements of mRNA may represent at least the amount of ATXN2 protein reduced by a given amiRNA. Surprisingly, the amiRNA targeting the ATXN2 coding sequence (1784) yielded greater knockdown than the amiRNA targeting the 3′ UTR (4402), which is different than the relative performance of those amiRNAs in Deep Screen 1.

[0406] As a further investigation of amiRNA targeting the coding region versus the 3′ UTR, a second experiment was done (FIG. 31). In this case, all neurons were treated at a dose intermediate between the two levels tested in the first human neuron lentiviral dosing experiment. As before, amiRNAs targeting the coding sequence (1755 (guide sequence SEQ ID NO:1185), 1784 (guide sequence SEQ ID NO:112), 3302 (guide sequence SEQ ID NO:1216), 3330 (guide sequence SEQ ID NO:1811), and 3805 (guide sequence SEQ ID NO:1221) yielded stronger knockdown than amiRNAs targeting the 3′ UTR (4402 (guide sequence SEQ ID NO:1279), 4242 (guide sequence SEQ ID NO:1233), and 4502) in these neuronal cultures. The amount of mRNA reduction exceeded 75% for some amiRNAs, such as 1755 (guide sequence SEQ ID NO:1185), 1784 (guide sequence SEQ ID NO:112) and 3330 (guide sequence SEQ ID NO:1811).

### Methods

### Motor Neuron Production

[0407] Induced pluripotent stem cells (GM25256, Coriell Institute) were cultured in feeder-free conditions, in mTeSR1 media on Matrigel coated plates, according to standard procedures. To begin differentiation, iPSC colonies grown in 6-well dishes were dissociated with 500 uL ReLeSR, incubating 3 minutes at 37 C, and gently agitated. 1 mL of complete mTeSR1 media is added to stop dissociation. Cell suspension was collected, ReLeSR removed and cells resuspended in N2B27 differentiation media: 50 mL of 50% mTeSR1 and 50% NB27 differentiation media (50% DMEM-F12, 50% Neurobasal medium, 1×N-2 supplement, 1×B-27 supplement, XenoFree, 0.5× penicillin-streptomycin, 1×2-mercaptoethanol, 20 uM L-ascorbic acid). Rock Inhibitor Y-27632 (5 micromolar), LDN (200 nM), SB 431542 (40 micromolar), and Chir 99021 (3 micromolar) were added. Cell suspension was then transferred to a 75 cm² ultra low attachment U-flask for 24 hours. Cells then aggregated into small spheroids.

[0408] Media changes were then performed on days 2, 4, 6, 9, and 12. Media included (all based in N2B27 differentiation media): Day 2: Retinoic acid (1 micromolar), SAG (1 micromolar), LDN-193189 (0.2 micromolar), SB 431542 hydrate (40 micromolar), CHIR 99021 (3 micromolar). Day 4: Retinoic acid (1 micromolar), SAG (1 micromolar), LDN-193189 (0.2 micromolar). Day 6: Retinoic acid (1 micromolar); SAG (1 micromolar). Day 9: Retinoic acid (1 micromolar), SAG (1 micromolar), DAPT (10 micromolar). Day 12: DAPT (10 micromolar). By day 14, neuronal spheroids were present and were dissociated to plate motor neurons.

[0409] Neuronal spheroids were then dissociated with a papain:DNAse solution and triturated 4-5×. Cell suspensions were then divided into wells of 6-well plates; and after a 15 minute incubation, further triturated. Following this dissociation, enzyme was inactivated with a DMEM and knockout serum replacement (KOSR) mix, centrifuged, washed again in 90% DMEM/10% KOSR, centrifuged, and resuspended in complete neurobasal media: Neurobasal medium, 1×N-2 supplement, 1×B-27 supplement, XenoFree, 0.5× penicillin-streptomycin, 20 uM L-ascorbic acid, 1% KOSR, Rock Inhibitor Y-27632 (5 micromolar), GDNF (10 ng/mL), BDNF (20 ng/mL), CNTF (10 ng/mL), DAPT (5 micromolar). Cells were then centrifuged again, resuspended in complete neurobasal media, passed through a 40 micron cell strainer, counted via trypan blue staining and a hemocytometer, then diluted to 20K/well (96-well format) or 200K/well (24-well format) for plating in PDL/Laminin coated plates. Cells were cultured in a volume of neurobasal media: 200 uL/well (96-well format) or 1 mL/well (24-well format).

[0410] The PDL/Laminin coating was done by treating plates with a 100 microgram/mL solution of poly-D-lysine in PBS overnight at 4 C; washing 3 times with PBS; then treating plates overnight at 4 C with a 50 microgram/mL solution of laminin in PBS.

[0411] 48 hours after plating, 50% of media was replaced with neuron maintenance media (Neurobasal, with 1×N-2 supplement, 1×Xeno-Free B-27 supplement, 0.5× penicillin-streptomycin, 20 micromolar L-ascorbic acid, with 10 ng/mL GDNF, 10 ng/mL BDNF, 10 ng/mL CNTF), including DAPT (5 micromolar). Thereafter, 50% of media was replaced 3 times per week, not including DAPT.

[0412] References relevant to the above protocol include: (Highly efficient neural conversion of human ES and iPS cells by dual inhibition of SMAD signaling (Chambers et al., Nat Biotechnol (2009) 27:275-280) and (Maury et al., Nat Biotechnol (2014) 33:89-96).

Reagents and Equipment for iPSC Embryoid Body Formation

| Reagent | Vendor | Cat. No. |
|---|---|---|
| DMEM/F-12 | ThermoFisher | 11320-033 |
| Neurobasal Medium | | 21103049 |
| N-2 Supplement (100X) | | 17502-048 |
| B-27 Supplement (50X), XenoFree | | A1486701 |
| Phosphate-Buffered Saline (PBS) pH 7.4 | | 10010023 |
| Penicillin-Streptomycin 100x | | 15140122 |
| 2-Mercaptoethanol 1000x | | 21985023 |
| L-Ascorbic Acid | Millipore Sigma | A4403- |
| | | 100MG |
| Rock Inhibitor (Y-27632), 5MG | | Y0503-5MG |
| SB 431542 hydrate | | S4317-5MG |
| Retinoic Acid | | R2625-50MG |
| DAPT | | D5942-5MG |
| SAG, SHH agonist | | 566660-5MG |
| MTeSR1 cGMP, feeder-free maintenance | StemCell | 85850 |
| medium kit | Technologies, | |
| ReLeSR | Inc | 05872 |
| LDN-193189 in solution | Fisher Scientific | NC0689818 |
| CHIR 99021 10MG | Tocris | 4423 |

| Equipment/Supply | Vendor | Cat. No. |
|---|---|---|
| Ultra-Low Attachment 75 cm² U-Flask | Corning | 3814 |
| 6-well plate | Corning | 353046 |
| Nalgene Rapid-Flow 500 mL Filter Units | VWR (Nalgene) | 73520-984 |

### Reagents and Embryoid Body Dissociation and Motor Neuron Culture:

| Reagent | Vendor | Cat. No. |
|---|---|---|
| Neurobasal Medium | ThermoFisher | 21103049 |
| DMEM/F-12 | | 11320-033 |
| N-2 Supplement (100X) | | 17502-048 |
| B-27 Supplement (50X), XenoFree | | A1486701 |
| 2-Mercaptoethanol 1000x | | 21985023 |
| Phosphate-Buffered Saline (PBS) pH 7.4 | | 10010-049 |
| Penicillin-Streptomycin 100x | | 15140122 |
| KnockOut Serum Replacement | | 10828010 |
| Laminin Mouse Protein, 1 mg in | | 23017015 |
| solution | | |
| Rock Inhibitor (Y-27632), 5 mg | Millipore Sigma | Y0503-5MG |
| DAPT | | D5942-5MG |
| L-Ascorbic Acid | | A4403- |
| | | 100MG |
| Poly-D-Lysine solution, 1 mg/mL | | A-003-E |
| Recombinant Human GDNF, 50 μg | R&D Systems | 212-GD-050 |
| Recombinant Human BDNF, 50 μg | | 248-BDB-050 |
| Recombinant Human CNTF, 50 μg | | 257-NT-050 |
| Papain, ≥100 units per vial | Worthington | LK003178 |
| DNase, ≥1,000 Kunitz units per vial | | LK003172 |

### Equipment for Embryoid Body Dissociation and Motor Neuron Culture

| Equipment/Supply | Vendor | Cat. No. |
|---|---|---|
| 6-well Clear TC-treated Plates | Corning | 353046 |
| 12-well Clear TC-treated Plates | Corning | 353043 |
| 24-well Clear TC-treated Plates | Corning | 353047 |
| 96-well optic clear bottom, black wall | PerkinElmer | 6005550 |
| microplate | | |
| Nalgene Rapid-Flow 500 mL Filter Units | VWR (Nalgene) | 73520-984 |

### Lentiviral Production

[0415] To test the efficacy of miR16-2 embedded guides in stem-cell derived motor neurons, amiRNAs were expressed from an H1 promoter embedded within a lentiviral construct as described above. Lentivirus was generated with Lenti-X 293T (Takara, 632180) cells transfected with psPAX2 (Cellecta, P/N CPCP-PAX2) and pMD2.2 (Cellecta, CPCP-PM2G) using Lipofectamine LTX and PLUS Reagent (Thermo, P/N 15338-100). The following day after transfection media was changed to include ViralBoost Reagent (Alstem, P/N VB100) and then 2 days later the viral production media was filtered and concentrated using Lenti-X Concentrator (Takara, P/N 631232) and resuspended in N2B27 media.

qPCR Analysis

[0416] Stem-cell derived motor neurons were transduced, and 7 days post-transduction, media was removed, washed with PBS and cells lysed with Buffer RLT supplemented with beta-Mercaptoethanol. RNA was purified using Qiagen RNeasy Plus Mini Kit (Qiagen, P/N 74134) and reverse-transcribed using SuperScript VILO cDNA Synthesis Kit (Thermo, P/N 11754250). Using TaqMan Fast Advanced Master Mix (Thermo, P/N 4444556) and QuantStudio 6 Flex Real-Time PCR System (Thermo), Ct values were calculated using primer/probe sets to ATXN2 (Thermo, Hs01002847_m1), GUSB (Thermo, Hs00939627_m1), and B2M (Thermo, Hs00187842_m1). The average Ct across 4 replicates was calculated, and using the delta-delta Ct method, the delta Ct was calculated for ATXN2 to each internal control, then the delta-delta Ct was calculated to the average of the untreated conditions. The mean of the normalized values to untreated conditions were calculated and graphed as shown.

Western Analysis of ATXN2 Levels from Neurons Treated with ATXN2 amiRNA Expressing Lentiviruses

[0417] Protein extraction was performed by placing plates on ice, aspirating media, and adding 50-100 microliters cold RIPA buffer (TEKNOVA #50-843-016) supplemented with protease and phosphatase inhibitor tablet (Pierce #A32959), Halt protease inhibitor cocktail (Thermo #1861279) and PMSF (Cell Signaling Technology #8553S). Individual cell lifters were used to scrape each well thoroughly, plates were tilted and lysates were harvested and incubated on ice for an additional 30 min. Samples were centrifuged for 15 min at 17,000×g at 4° C., and supernatant was transferred to a fresh tube and stored at −80° C. Protein lysates were quantitated (Pierce, 23225), resulting in approximately 40 μg total protein per sample.

[0418] The NuPage system (Thermo) was used for gel electrophoresis. Five μg of each sample was loaded onto 4-12% Bis-Tris protein gels (Thermo, NP0321BOX) and run at constant 200V for 1 hr. Revert 700 (Licor, 926-11010) was used to assay for protein loading. Proteins were transferred onto PVDF membrane (EMD Millipore, IPFL00005) overnight at 4° C. using constant 30V and 90 mA. Membranes were blocked for 1 hr at RT (Rockland, MB-070). Primary antibody incubation was performed overnight rocking at 4° C., including anti-Atxn2 (1:1000, BD, 611378), anti-GFP (1:2000, CST, 2956) and beta-actin (1:2000, CST, 4970). Washing was performed 4×5 min with TBS+0.1% tween-20, and secondary antibodies were incubated for 1 hr rocking at RT (1:15,000 each of 800CW goat anti-mouse and 680RD donkey anti-rabbit, Licor). Membranes were washed again and imaging was performed on an Odyssey Fc Imaging system (Licor). Signal quantitation was by Licor image-studio lite.

### Example 4: Embedding of Top Hits from Pooled Screen in AAV Cis-Plasmids and AAV Production

[0419] To test the ability of top performing amiRNAs identified from the pooled screen to knock down ATXN2 when embedded in AAV, 10 top miRNAs were cloned downstream of a H1 promoter (nucleotides 113-203 of SEQ ID NO:1522) in a cis plasmid (transfer plasmid) for AAV production. An example of a plasmid sequence (5′ ITR to 3′ ITR) (scAAV_AMELY_V1_H1_micropool_ITR_to_ITR) comprises the nucleotide sequence of SEQ ID NO:1522; where the desired amiRNA embedded in a miRNA backbone is inserted in nucleotides 204-341 of SEQ ID NO:1522. After AAV9 production by triple transfection of HEK293T cells with the cis-plasmid and helper plasmids and harvest of encapsidated AAV, vector genome DNA was extracted with Quick-DNA Viral Kit (Zymo, P/N D3015) to assess vector integrity. Purified vector was quantified using Qubit dsDNA HS Assay Kit (Thermo, P/N Q32854) and vector genome size was assessed by agarose gel electrophoresis and stained SyberSafe for visualization. Vector genome size was assessed by agarose gel electrophoresis (FIG. 32). Surprisingly, two bands were observed. The upper band migrated at the expected size 2284 bp, whereas the lower band migrated farther than the calculated vector size, or smaller in length than the full-length vector. Extraction of the band representing the full-length vector and subsequent Sanger sequencing with a primer amplifying towards the embedded aimRNA resulted in successful sequencing of the expected amiRNA. Whereas extraction of the smaller DNA product and sequencing failed to sequence through the embedded aimRNA, suggesting that the lower band might represent a vector truncation centered around the artificial miRNA, as noted in (Xie et al., Molecular Therapy (2013) 28:422-430). Calculation of predicted DNA secondary structure for miRs in the miR16-2 backbone using mfold (Zuker Nucleic Acids Research (2003) 31:3406-15) showed this sequence to form strong secondary structure, with Gibbs free binding energy of −26.78.

[0420] Using ImageJ, the individual vector genome lanes of an image gathered with the SyberSafe stained DNA gel were selected, the intensity of the lane plotted, and peaks quantified. Using the calculated lengths of the full-length and miR-centered truncated vector genomes of 2284 and 2077 bp respectively, the relative staining-intensity-derived molarity of each was calculated. With these values, the percentage full-length vector was calculated as the percentage of full-length divided by the combined amount of full-length and miR-centered truncated vector genomes (Table 20)

TABLE 20
Percentage of full-length vector genome

| H1 AMELY | percentage full-length |
|---|---|
| V1 guide | vector genome |
| miR16-2-XD-14792 | 68.3 |
| miR16-2-1479 | 56.7 |
| miR16-2-1755 | 70.3 |
| miR16-2-3330 | 62.5 |
| miR16-2-4402 | 64.1 |
| miR16-2-4405 | 67.8 |
| miR16-2-4406 | 71.0 |
| miR16-2-4409 | 67.2 |
| miR16-2-4502 | 64.9 |

### Example 5: Second Pooled miRNA Screen

[0421] Given the truncation observed in AAV vectors expressing miR16-2 embedded amiRNAs, a second pooled amiRNA screen was devised to embed the guide sequences from the top ATXN2 miRNA hits from the first pooled screen into a diverse set of 20 miRNA backbones.

### ATXN2 Targeting Sequence Selection for DS2

[0422] ATXN2 targeting sequences presumed to be efficacious and safe were selected from Deep Screen 1 to enter “Deep Screen 2.” Sequences that were enriched in the low ATXN2 signal FACS bin and demonstrated low dropout (minimal change in representation comparing an early to a late timepoint) were prioritized. To calibrate the dynamic range of the assay, some sequences with high dropout were additionally included. Since there may be biological variability in the processing precision of the mature guide strand, guides bracketing efficacious guides (by position along the ATXN2 transcript) were additionally entered into Deep Screen 2.

Essential Gene Control miRNA Selection

[0423] A subset of the essential gene targeting amiRNAs with either ‘high’ or ‘medium’ dropout, with respect to other essential-gene targeting amiRNAs, were selected for Deep Screen 2 based on performance in Deep Screen 1.

### 911 Controls

[0424] A subset of sequences targeting ATXN2 were paired with their cognate 911 controls. In a 911 control, bases 9, 10, and 11 of the guide strand are complemented, along with corresponding change in the passenger strand, such that the resulting mature miRNA does not slice the target mRNA of the original guide. Because many aspects of amiRNA ‘off-target’ activity are presumed to occur through binding interactions with the seed region (bases 2-8), these 911 controls should in principle display a similar off-target profile as the original miRNA and should help distinguish on- and off-target activity.

### ATXN2 Scramble Controls

[0425] A subset of the miRNA scramble controls from Deep Screen 1 was carried over into Deep Screen 2. These were considered for mean centering the data.

### ATXN2 Backbone Selection, Processing Enhancement Motifs, and Passenger Variations

[0426] MicroRNA backbones were selected for naturally exhibiting high processing precision, high guide to passenger ratio, and efficient target knockdown as an artificial miRNA. Both miRNA performance in functional screens and 5′ guide processing homogeneity were considered¹⁻⁴.

[0427] Primary miRNA transcript sequence was identified in miRbase. The extended sequence contexts around the miRNAs were ascertained in EntrezGene. Surrounding 5′ and 3′ sequence with high mammalian conservation were used to define final 138 nt miRNA-embedded fragments that would be inserted into the pooled library.

[0428] Mfold and RNAfold were used to examine folding patterns and to consider Gibbs free energy, as there is evidence that high Gibbs free energy derived from extensive secondary structure in the miRNA may produce miR-centered truncations when later cloned and produced into AAV.

[0429] The basal stem, loop, and guide and passenger sequences were defined by stem loop folding predictions on miRbase and Mfold. The rules for passenger variations such as bulges and other asymmetries were chosen to mimic non-complementary base pairing in the endogenous hairpin stem and incorporated into the library construction algorithms.

[0430] Sequence motifs that enable efficient processing of pri-miRNA backbones have previously been identified. These include an UG motif at the 5′ end of the pre-miRNA, a mismatched GHG motif in the stem, and a 3′ CNNC motif Many of the primary miRNA transcripts selected naturally contain these motifs. Some of these motifs were artificially incorporated into five backbones, and these resulting miRNA backbones are denoted by “_M” (e.g., “miR-1-1_M”). Table 21 provides miRNA backbone sequences (in DNA format) used in Deep Screen 2. The RNA sequences of the miRNA backbone are provided by converting the “T” nucleotides in the sequences of Table 21 to “U” nucleotides.

TABLE 21
miRNA backbone sequences used in Deep Screen 2

| miR_with | 5′ miR context | | | | | | 3′ miR context |
|---|---|---|---|---|---|---|---|
| suffix | (flanking) | 5′ basal stem | 5p | loop | 3p | 3′ basal stem | (flanking) |
| miR-1-1 | catgcagactgcctgct | TGGG | passenger | TATGGACCTGCTAA | guide | CTCA | ggccgggacctctctegccg |
| | [SEQ ID NO: 1523] | | | GCTA | | | cactgaggggcactccaca |
| | | | | [SEQ ID NO: 1524] | | | ccacgggggccg |
| | | | | | | | [SEQ ID NO: 1525] |
| miR-1-1_M | catgcagactgcctgct | TGGG | passenger | TATGGACCTGCTAA | guide | CTCA | ggccgggacctcttccgccg |
| | [SEQ ID NO: 1526] | | | GCTA | | | cactgaggggcactccaca |
| | | | | [SEQ ID NO: 1527] | | | ccacgggggccg |
| | | | | | | | [SEQ ID NO: 1528] |
| miR-100 | CCCAAAAGAGA | CCTGTTGCCAC | guide | GTATTAGTCCG | passenger | TGTGTCTGTTA | CAATCTCACGGA |
| | GAAGATATTGA | A | | [SEQ ID NO: 1531] | | GG | CCTGGGGCTTTGC |
| | GG | [SEQ ID | | | | [SEQ ID NO: 1532] | TTATATGCC |
| | [SEQ ID NO: 1529] | NO: 1530] | | | | | [SEQ ID NO: 1533] |
| miR-100_M | CCCAAAAGAGA | CCTGTTGCCAC | guide | GTATTAGTCCG | passenger | TGTGTCTGTTA | CtATtcCACGGACC |
| | GAAGATATTGAt | A | | [SEQ ID NO: 1536] | | GG | TGGGGCTTTGCTT |
| | G | [SEQ ID | | | | [SEQ ID NO: 1537] | ATATGCC |
| | [SEQ ID NO: 1534] | NO: 1535] | | | | | [SEQ ID NO: 1538] |
| miR-122 | ggctacagagttt | CCTTAGCAGAG | guide | TGTCTAAACTAT | passenger | TAGCTACTGCT | aatccttccctcgataaatgtc |
| | [SEQ ID NO: 1539] | CTG | | [SEQ ID NO: 1541] | | AGGC | ttggcatcgtttgctttg |
| | | [SEQ ID | | | | [SEQ ID NO: 1542] | [SEQ ID NO: 1543] |
| | | NO: 1540] | | | | | |
| miR-122 M | ggctacagagttt | GCTTAGCAGAG | guide | TGTCTAAACTAT | passenger | TAGCTACTGCT | catccttccctcgataaatgtc |
| | [SEQ ID NO: 1544] | CTG | | [SEQ ID NO: 1546] | | AGGC | ttggcatcgtttgctttg |
| | | [SEQ ID | | | | [SEQ ID NO: 1547] | [SEQ ID NO: 1548] |
| | | NO: 1545] | | | | | |
| miR-124 | TTCCTTCCTCAG | AGGCCTCTCTC | passenger | ATTTAAATGTCCAT | guide | GAATGGGGCTG | GCTGAGCACCGT |
| | GAGAA | [SEQ ID | | ACAAT | | [SEQ ID NO: 1552] | GGGTCGGCGAGG |
| | [SEQ ID NO: 1549] | NO: 1550] | | [SEQ ID NO: 1551] | | | GCCCGCCAagga |
| | | | | | | | [SEQ ID NO: 1553] |
| miR-124 M | TTCCTTCCTCAG | tGGCCTCTCTC | passenger | ATTTAAATGTCCAT | guide | GAATGGGGCTt | aCTGccgcaCGTGG |
| | GAGAA | [SEQ ID | | ACAAT | | [SEQ ID NO: 1557] | GTCGGCGAGGGC |
| | [SEQ ID NO: 1554] | NO: 1555] | | [SEQ ID NO: 1556] | | | CCGCCAagga |
| | | | | | | | [SEQ ID NO: 1558] |
| miR-128 | ATTTtgcaataattggc | TGAGCTGTTGG | passenger | GAGGTTTACATTTC | guide | TTCAGCTGCTTC | ctggcttctttttactcaggttt |
| | cttgttcc | A | | [SEQ ID NO: 1561] | | [SEQ ID NO: 1562] | ccactgct |
| | [SEQ ID NO: 1559] | [SEQ ID | | | | | [SEQ ID NO: 1563] |
| | | NO: 1560] | | | | | |
| miR-130a | gcagggccggcatgcct | TGCTGCTGGCC | passenger | CTGTCTGCACCTGTC | guide | TGGCCGTGTAG | ctacccagcgctggctgcct |
| | c | A | | ACTAG | | TG | cctcagcattg |
| | [SEQ ID NO: 1564] | [SEQ ID | | [SEQ ID NO: 1566] | | [SEQ ID NO: 1567] | [SEQ ID NO: 1568] |
| | | NO: 1565] | | | | | |
| miR-155E | CTGGAGGCTTG | GGGCTGTATGC | guide | TTTTGGCCTCTGACT | passenger | CAGGACAAGGC | TTTATCAGCACTC |
| | CTTT | TG | | GA | | CC | ACATGGAACAAA |
| | [SEQ ID NO: 1569] | [SEQ ID | | [SEQ ID NO: 1571] | | [SEQ ID NO: 1572] | TGGCCACCGTG |
| | | NO: 1570] | | | | | [SEQ ID NO: 1573] |
| miR-155M | CCTGGAGGCTT | AGGCTGTATGC | guide | TTTTGGCCACTGACT | passenger | CAGGACACAAG | TGTTACTAGCACT |
| | GCTGA | TG | | GA | | GCC | CACATGGAACAA |
| | [SEQ ID NO: 1574] | [SEQ ID | | [SEQ ID NO: 1576] | | [SEQ ID NO: 1577] | ATGGCCACC |
| | | NO: 15751 | | | | | [SEQ ID NO: 1578] |
| miR-138-2 | gccggcggagttctggta | CGTTGCTGC | guide | GACGAGCAGCGCAT | passenger | GTTGCATCA | tacccatcctctccaggcga |
| | t | | | CCTCTTACCC | | | gcctcgtgggaccGG |
| | [SEQ ID NO: 1579] | | | [SEQ ID NO: 1580] | | | [SEQ ID NO: 1581] |
| miR-144 | TCAAGCCATGC | TGGGGCCCTGG | passenger | AGTTTGCGATGAGA | guide | AGTCCGGGCAC | AGCTCTGGAGCC |
| | TTCCTGTGCCCC | CT | | CAC | | CCCC | TGACAAGGAggaca |
| | CAG | [SEQ ID | | [SEQ ID NO: 1584] | | [SEQ ID NO: 1585] | [SEQ ID NO: 1586] |
| | [SEQ ID NO: 1582] | NO: 1583] | | | | | |
| miR-190a | GAGCTCAGTCA | TGCAGGCCTCT | guide | TGTTATTTAATCCA | passenger | CTACAGTGTCT | CTGTCTCCGGGG |
| | AACCTGGATGC | GTG | | [SEQ ID NO: 1589] | | TGCC | GTTCCTAATAAA |
| | CTTTTC | [SEQ ID | | | | [SEQ ID NO: 1590] | G |
| | [SEQ ID NO: 1587] | NO: 1588] | | | | | [SEQ ID NO: 1591] |
| miR-190a_ | GAGCTCAGTCA | TGCAGGCgTCT | guide | TGTTATTTAATCCA | passenger | CTACAGTCTCTT | CTGTCTCCGGGG |
| M | AACCTGGATGC | GTG | | [SEQ ID NO: 1594] | | GCC | GTTCCTAATAAA |
| | CTTTTC | [SEQ ID | | | | [SEQ ID NO: 1595] | G |
| | [SEQ ID NO: 1592] | NO: 15931 | | | | | SEQ ID NO: 1596] |
| miR-132 | GCCGTCCGCGC | CCGCCCCCGCG | Passenger | CTGTGGGAACTGGA | guide | CCCCGCAGCAC | CGCGCCACGCCG |
| | GCC | TCTCCAGGG | | GG | | GCCCACGCGC | CGCCCCGAGCC |
| | [SEQ ID NO: 1597] | [SEQ ID | | [SEQ ID NO: 1599] | | [SEQ ID NO: 1600] | [SEQ ID NO: 1601] |
| | | NO: 1598] | | | | | |
| miR-451a | GCTCTCTGCTC | CTTGGGAATGG | guide | None | passenger | TCTTGCTATACC | AAACGTGCCAGG |
| | AGCCTGTCACA | CAAGG | | | | CAGA | AAGAGAACTCAG |
| | ACCTACTGACT | [SEQ ID | | | | [SEQ ID NO: 1604] | [SEQ ID NO: 1605] |
| | GCCAGGGCA | NO: 1603] | | | | | |
| | [SEQ ID NO: 1602] | | | | | | |
| miR-223 | TCCCCACAGAA | CCTGGCCTCCT | passenger | CTCCATGTGGTAGA | guide | AGTGCGGCACA | CTCTAGGCC |
| | GCTCTTGG | GCAGTGCCACG | | G | | TGCTTACCAG | |
| | [SEQ ID NO: 1606] | CT | | [SEQ ID NO: 1608] | | [SEQ ID NO: 1609] | |
| | | [SEQ ID | | | | | |
| | | NO: 1607] | | | | | |
| miR-16-2 | TTATGTTTGGAT | GTTCCACTC | guide | TAGTGAAATATATA | passenger | TAGTGTGAC | AGGGATACAGCA |
| | GAACTGACATA | | | TTAAA | | | ACTATTTTATCAA |
| | CTT | | | [SEQ ID NO: 1611] | | | TTGTTT |
| | [SEQ ID NO: 1610] | | | | | | [SEQ ID NO: 1612] |

[0431] Oligonucleotides were designed that embedded the guide sequences described in Table 19 into miRNA backbones, using flanking sequences as defined in Table 21, and with passenger sequences defined by the rules in Table 8. For example, an artificial miRNA with miR-100 backbone in DNA format for insertion into a transfer plasmid may be designed comprising from 5′ to 3′:5′ miR context (flanking) sequence of SEQ ID NO:1529; 5′ basal stem sequence of SEQ ID NO:1530; desired guide sequence; loop sequence of SEQ ID NO:1531; desired passenger sequence designed according to the rules in Table 8; 3′ basal stem sequence of SEQ ID NO:1532; and 3′ miR context (flanking) sequence of SEQ ID NO:1533. The artificial miRNA in RNA format may be obtained by converting the “T” nucleotides in these sequences to “U” nucleotides. The pooled library oligonucleotides were cloned into a lentiviral plasmid pLVX-EF1A-miR-CMV-Puro (5′ LTR to 3′ LTR sequence comprises the nucleotide sequence of SEQ ID:1613) with an EF1alpha promoter to express the amiR, and a CMV promoter to express a PuroR selection marker. The artificial miRNA oligonucleotide may be inserted at nucleotides 3126-3263 of SEQ ID NO:1613. After packaging the library in the plasmid, library composition was assessed by sequencing, and it was noted that the abundance of miRs embedded in the miR-16-2 backbone was in general substantially less than other backbones. One potential explanation would be that during library amplification—when all library elements undergo PCR amplification—elements including the miR-16-2 backbone are amplified less efficiently than other backbones. This could perhaps be because of the strong DNA hairpin that forms with the miR-16-2 backbone. Due to the low number of miR-16-2 backbone elements remaining in the library, counts of miR-16-2 containing guides were low and therefore noisy, and not included in further analyses.

[0432] After cloning, packaging, and execution of screen (see methods), sequencing data were analyzed essentially as for Deep Screen 1. Abundance of library elements were calculated by number of sequencing reads exactly matching input library elements. In this screen no baseline subtraction was done for either ATXN2 levels or for dropout. FIG. 33A shows a scatterplot plotting the correspondence in the ATXN2 knockdown metric for two screen replicates against each other. In this case what is plotted is the ratio of abundance of sequence reads for guide elements in the 10% low-ATXN2 signal sort bin versus an unsorted sort bin. There is good correspondence for elements that have low ratios for unsorted/10% low-ATXN2 signal—that is, elements that induce ATXN2 depletion—but there is less correspondence for elements with similar abundance in the unsorted and 10% unsorted bin.

[0433] FIG. 33B shows boxplots of knockdown performance of miRs embedded in the shown backbones; Table 22 shows the median and 95^{th} percentiles of performance. By this metric, some of the top performing miRs, as measured by median performing miRNA, were miR-1-1_M, miR1-1, miR-130a, miR-100, and miR-100_M. It is noted, however, that there were top miRNAs in each of these backbones that, as measured by this assay (ratio of counts of guides in a low-Atxn2 sorted pool versus guides in unsorted cells), performed similarly across miR backbones. Therefore, this assay made available multiple miR backbones with strong performance. This was likely due to good processing of the artificial pri-miRNA by the microprocessor and dicer complexes.

TABLE 22
Performance of miRNAs Across miRNA Backbones

| | miR_with_suffix | median | ninety_fifth |
|---|---|---|---|
| 1 | miR-1-1_M | −0.6772802 | −2.2788937 |
| 2 | miR-1-1 | −0.5968477 | −2.1875722 |
| 3 | miR-130a | −0.5111669 | −2.157525 |
| 4 | miR-100 | −0.2912209 | −2.0887075 |
| 5 | miR-100_M | −0.2094112 | −1.9758731 |
| 6 | miR-155E | −0.1742495 | −1.8818528 |
| 7 | miR-132 | −0.1144013 | −2.0204587 |
| 8 | miR-190a | −0.030798 | −2.0813007 |
| 9 | miR-190a_M | 0.04198442 | −2.1250904 |
| 10 | miR-122 | 0.05806267 | −1.9039473 |
| 11 | miR-122_M | 0.17311752 | −1.851009 |
| 12 | miR-155M | 0.50609504 | −1.11192 |
| 13 | miR-124_M | 0.55091372 | −0.9016042 |
| 14 | miR-124 | 0.57242321 | −0.95078 |
| 15 | miR-144 | 0.71869783 | −1.3372836 |
| 16 | miR-138-2 | 0.77876566 | −0.8666664 |
| 17 | miR-223 | 1.04743176 | 0.46242634 |

[0434] The depletion of elements targeting essential genes was also used as an orthogonal evaluation of miR backbone performance. FIG. 34 shows boxplots of the depletion of elements from the 18-day timepoint versus the 1-day post transduction timepoint. There is a similar ranking of ‘performance’ of the various miR backbones by this metric compared to the ATXN2 knockdown metric. This may be because of the ranking of miR backbones in processing to yield mature amiRNAs.

[0435] Table 23 lists the top 100 amiRNAs, ranked by mean enrichment in the ATXN2 low signal sorted cells. The miR backbone, guide sequence, targeting position within the complementary ATXN2 transcript sequence, passenger sequence, and the amiRNA sequence (including the miR backbone, loop, ATXN2 targeting guide and passenger), are provided in both RNA and DNA format. The ‘passenger’ sequence refers to sequence complementary to the guide sequence, but including bulges and mismatches designed according to the rules set forth in Table 8 to mimic endogenous miRNA structure. Note that after processing of the pri-miRNA, the passenger strand will likely initiate 1-3 nt downstream of the nucleotide shown in the table, and include 1-3 nt beyond the last nucleotide listed, derived from the miR cassette. Table 24 lists the top 10 amiRNAs for each miR backbone, excluding low performing backbones. Top amiRNAs were ranked by mean enrichment of sequence counts of the given amiR constructs in the ATXN2 low signal sorted cells. The miR backbone, guide sequence, targeting position within the complementary ATXN2 sequence, passenger sequence, and the amiRNA sequence are provided in RNA and DNA format.

TABLE 23
Top 100 amiRNAs

| Atxn2 | | Atxn2 | | Guide | Passenger | | Guide | Passenger | |
|---|---|---|---|---|---|---|---|---|---|
| Targeting | miR | low/unsort | T1/T0 | Sequence | Sequence | miR Cassette | Sequence | Sequence | miR Cassette |
| Position | Backbone | log2 FC | log2 FC | (DNA) | (DNA) | (DNA) | (RNA) | (RNA) | (RNA) |
| 2945 | miR-1-1_M | -2.89804 | 0.152222 | TGTAGTAG | TGAGCCAA | CATGCAGACTGC | UGUAGUAG | UGAGCCAA | CAUGCAGACUG |
| | | | | AAGGCTTTG | AGCCTTCTA | CTGCTTGGGTGA | AAGGCUUU | AGCCUUCU | CCUGCUUGGGU |
| | | | | GCTGA | CCGACA | GCCAAAGCCTTC | GGCUGA | ACCGACA | GAGCCAAAGCC |
| | | | | [SEQ ID | [SEQ ID | TACCGACATATG | [SEQ ID | [SEQ ID | UUCUACCGACA |
| | | | | NO: 685] | NO: 1633] | GACCTGCTAAGC | NO: 1213] | NO: 1828] | UAUGGACCUGC |
| | | | | | | TATGTAGTAGAA | (Same guide as | | UAAGCUAUGUA |
| | | | | | | GGCTTTGGCTGA | XD-14860) | | GUAGAAGGCUU |
| | | | | | | CTCAGGCCGGG | | | UGGCUGACUCA |
| | | | | | | ACCTCTTCCGCC | | | GGCCGGGACCU |
| | | | | | | GCACTGAGGGG | | | CUUCCGCCGCA |
| | | | | | | CACTCCACACCA | | | CUGAGGGGCAC |
| | | | | | | CGGGGGCC | | | UCCACACCACG |
| | | | | | | [SEQ ID NO: 1711] | | | GGGGCC |
| | | | | | | | | | [SEQ ID NO: 1908] |
| 3330 | miR-190a | -2.86183 | 0.46905 | TATGCTGAG | CCATTATCA | GAGCTCAGTCA | UAUGCUGA | CCAUUAUC | GAGCUCAGUCA |
| | | | | ACTGATAAT | GTCTCAGCA | AACCTGGATGCC | GACUGAUA | AGUCUCAG | AACCUGGAUGC |
| | | | | GTGG | CC | TTTTCTGCAGGC | AUGUGG | CACC | CUUUUCUGCAG |
| | | | | [SEQ ID | [SEQ ID | CTCTGTGTATGC | [SEQ ID | SEQ ID | GCCUCUGUGUA |
| | | | | NO: 1614] | NO: 1634] | TGAGACTGATA | NO: 1811] | NO: 1829] | UGCUGAGACUG |
| | | | | | | ATGTGGTGTTAT | | | AUAAUGUGGUG |
| | | | | | | TTAATCCACCAT | | | UUAUUUAAUCC |
| | | | | | | TATCAGTCTCAG | | | ACCAUUAUCAG |
| | | | | | | CACCCTACAGTG | | | UCUCAGCACCC |
| | | | | | | TCTTGCCCTGTC | | | UACAGUGUCUU |
| | | | | | | TCCGGGGGTTCC | | | GCCCUGUCUCC |
| | | | | | | TAATAAAG | | | GGGGGUUCCUA |
| | | | | | | [SEQ ID NO: 1712] | | | AUAAAG |
| | | | | | | | | | [SEQ ID NO: 1909] |
| 3043 | miR-144 | -2.80802 | 0.325474 | TTTGGTGCA | CCGGTTTGT | TCAAGCCATGCT | UUUGGUGC | CCGGUUUG | UCAAGCCAUGC |
| | | | | AAACAAAC | TTATGCACC | TCCTGTGCCCCC | AAAACAAA | UUUAUGCA | UUCCUGUGCCC |
| | | | | AGGCT | AAA | AGTGGGGCCCT | CAGGCU | CCAAA | CCAGUGGGGCC |
| | | | | [SEQ ID | [SEQ ID | GGCTCCGGTTTG | [SEQ ID | [SEQ ID | CUGGCUCCGGU |
| | | | | NO: 1615] | NO: 1635] | TTTATGCACCAA | NO: 1812] | NO: 1830] | UUGUUUAUGCA |
| | | | | | | AAGTTTGCGATG | | | CCAAAAGUUUG |
| | | | | | | AGACACTTTGGT | | | CGAUGAGACAC |
| | | | | | | GCAAAACAAAC | | | UUUGGUGCAAA |
| | | | | | | AGGAGTCCGGG | | | ACAAACAGGAG |
| | | | | | | CACCCCCAGCTC | | | UCCGGGCACCC |
| | | | | | | TGGAGCCTGAC | | | CCAGCUCUGGA |
| | | | | | | AAGGAGGACA | | | GCCUGACAAGG |
| | | | | | | [SEQ ID NO: 1713] | | | AGGACA |
| | | | | | | | | | [SEQ ID NO: 1910] |
| 2602 | miR-144 | -2.76068 | -0.25422 | TTTAGTAGT | TCGATGGAT | TCAAGCCATGCT | UUUAGUAG | UCGAUGGA | UCAAGCCAUGC |
| | | | | TGATCCATA | CATACTACT | TCCTGTGCCCCC | UUGAUCCA | UCAUACUA | UUCCUGUGCCC |
| | | | | GATT | AAA | AGTGGGGCCCT | UAGAUU | CUAAA | CCAGUGGGGCC |
| | | | | [SEQ ID | [SEQ ID | GGCTTCGATGGA | [SEQ ID | [SEQ ID | CUGGCUUCGAU |
| | | | | NO: 1616] | NO: 1636] | TCATACTACTAA | NO: 202] | NO: 1831] | GGAUCAUACUA |
| | | | | | | AAGTTTGCGATG | (Same guide as | | CUAAAAGUUUG |
| | | | | | | AGACACTTTAGT | XD-14837) | | CGAUGAGACAC |
| | | | | | | AGTTGATCCATA | | | UUUAGUAGUUG |
| | | | | | | GAAGTCCGGGC | | | AUCCAUAGAAG |
| | | | | | | ACCCCCAGCTCT | | | UCCGGGCACCC |
| | | | | | | GGAGCCTGACA | | | CCAGCUCUGGA |
| | | | | | | AGGAGGACA | | | GCCUGACAAGG |
| | | | | | | [SEQ ID NO: 1714] | | | AGGACA |
| | | | | | | | | | [SEQ ID NO: 1911] |
| 3341 | miR-1-1_M | -2.70967 | 0.193529 | ATAGACAT | GACTCAGC | CATGCAGACTGC | AUAGACAU | GACUCAGC | CAUGCAGACUG |
| | | | | GAGGATGC | ATCCTCATG | CTGCTTGGGGAC | GAGGAUGC | AUCCUCAU | CCUGCUUGGGG |
| | | | | TGAGAC | TGATAT | TCAGCATCCTCA | UGAGAC | GUGAUAU | ACUCAGCAUCC |
| | | | | [SEQ ID | SEQ ID | TGTGATATTATG | [SEQ ID | [SEQ ID | UCAUGUGAUAU |
| | | | | NO: 1617] | NO: 1637] | GACCTGCTAAGC | NO: 1813] | NO: 1832] | UAUGGACCUGC |
| | | | | | | TAATAGACATG | | | UAAGCUAAUAG |
| | | | | | | AGGATGCTGAG | | | ACAUGAGGAUG |
| | | | | | | ACCTCAGGCCG | | | CUGAGACCUCA |
| | | | | | | GGACCTCTTCCG | | | GGCCGGGACCU |
| | | | | | | CCGCACTGAGG | | | CUUCCGCCGCA |
| | | | | | | GGCACTCCACAC | | | CUGAGGGGCAC |
| | | | | | | CACGGGGGCC | | | UCCACACCACG |
| | | | | | | [SEQ ID NO: 1715] | | | GGGGCC |
| | | | | | | | | | [SEQ ID NO: 1912] |
| 3302 | miR-100 | -2.68521 | -0.3818 | TTGAACAA | CCCAAACC | CCCAAAAGAGA | UUGAACAA | CCCAAACC | CCCAAAAGAGA |
| | | | | GGGGCTGA | AGACCCTTG | GAAGATATTGA | GGGGCUGA | AGACCCUU | GAAGAUAUUGA |
| | | | | TTTGGG | CTCAT | GGCCTGTTGCCA | UUUGGG | GCUCAU | GGCCUGUUGCC |
| | | | | [SEQ ID | [SEQ ID | CATTGAACAAG | [SEQ ID | [SEQ ID | ACAUUGAACAA |
| | | | | NO: 688] | NO: 1638] | GGGCTGATTTGG | NO: 1216] | NO: 1833] | GGGGCUGAUUU |
| | | | | | | GGTATTAGTCCG | | | GGGGUAUUAGU |
| | | | | | | CCCAAACCAGA | | | CCGCCCAAACC |
| | | | | | | CCCTTGCTCATT | | | AGACCCUUGCU |
| | | | | | | GTGTCTGTTAGG | | | CAUUGUGUCUG |
| | | | | | | CAATCTCACGGA | | | UUAGGCAAUCU |
| | | | | | | CCTGGGGCTTTG | | | CACGGACCUGG |
| | | | | | | CTTATATGCC | | | GGCUUUGCUUA |
| | | | | | | [SEQ ID NO: 1716] | | | UAUGCC |
| | | | | | | | | | [SEQ ID NO: 1913] |
| 3043 | miR-100 | -2.67985 | -0.0584 | TTTGGTGCA | AGCCTGCTT | CCCAAAAGAGA | UUUGGUGC | AGCCUGCU | CCCAAAAGAGA |
| | | | | AAACAAAC | GGTTTGCAA | GAAGATATTGA | AAAACAAA | UGGUUUGC | GAAGAUAUUGA |
| | | | | AGGCT | CAAT | GGCCTGTTGCCA | CAGGCU | AACAAU | GGCCUGUUGCC |
| | | | | [SEQ ID | [SEQ ID | CATTTGGTGCAA | [SEQ ID | [SEQ ID | ACAUUUGGUGC |
| | | | | NO: 1615] | NO: 1639] | AACAAACAGGC | NO: 1812] | NO: 1834] | AAAACAAACAG |
| | | | | | | TGTATTAGTCCG | | | GCUGUAUUAGU |
| | | | | | | AGCCTGCTTGGT | | | CCGAGCCUGCU |
| | | | | | | TTGCAACAATTG | | | UGGUUUGCAAC |
| | | | | | | TGTCTGTTAGGC | | | AAUUGUGUCUG |
| | | | | | | AATCTCACGGAC | | | UUAGGCAAUCU |
| | | | | | | CTGGGGCTTTGC | | | CACGGACCUGG |
| | | | | | | TTATATGCC | | | GGCUUUGCUUA |
| | | | | | | [SEQ ID NO: 1717] | | | UAUGCC |
| | | | | | | | | | [SEQ ID NO: 1914] |
| 1755 | miR-100 | -2.66915 | -0.04161 | TCGGGTTGA | CACACTCCA | CCCAAAAGAGA | UCGGGUUG | CACACUCC | CCCAAAAGAGA |
| | | | | AATCTGAA | GCTTTCAAA | GAAGATATTGA | AAAUCUGA | AGCUUUCA | GAAGAUAUUGA |
| | | | | GTGTG | CCGT | GGCCTGTTGCCA | AGUGUG | AACCGU | GGCCUGUUGCC |
| | | | | [SEQ ID | [SEQ ID | CATCGGGTTGAA | [SEQ ID | [SEQ ID | ACAUCGGGUUG |
| | | | | NO: 657] | NO: 1640] | ATCTGAAGTGTG | NO: 1185] | NO: 1835] | AAAUCUGAAGU |
| | | | | | | GTATTAGTCCGC | | | GUGGUAUUAGU |
| | | | | | | ACACTCCAGCTT | | | CCGCACACUCC |
| | | | | | | TCAAACCGTTGT | | | AGCUUUCAAAC |
| | | | | | | GTCTGTTAGGCA | | | CGUUGUGUCUG |
| | | | | | | ATCTCACGGACC | | | UUAGGCAAUCU |
| | | | | | | TGGGGCTTTGCT | | | CACGGACCUGG |
| | | | | | | TATATGCC | | | |
| | | | | | | [SEQ ID NO: 1718] | | | GGCUUUGCUUA |
| | | | | | | | | | UAUGCC |
| | | | | | | | | | [SEQ ID NO: 1915] |
| 3272 | miR-100 | -2.65898 | -0.1606 | AGGACTGT | GCAATACG | CCCAAAAGAGA | AGGACUGU | GCAAUACG | CCCAAAAGAGA |
| | | | | AGGCAACA | TTTCCTACA | GAAGATATTGA | AGGCAACA | UUUCCUAC | GAAGAUAUUGA |
| | | | | TATTGC | ATCCA | GGCCTGTTGCCA | UAUUGC | AAUCCA | GGCCUGUUGCC |
| | | | | [SEQ ID | [SEQ ID | CAAGGACTGTA | [SEQ ID | [SEQ ID | ACAAGGACUGU |
| | | | | NO: 1618] | NO: 1641] | GGCAACATATTG | NO: 1814] | NO: 1836] | AGGCAACAUAU |
| | | | | | | CGTATTAGTCCG | | | UGCGUAUUAGU |
| | | | | | | GCAATACGTTTC | | | CCGGCAAUACG |
| | | | | | | CTACAATCCATG | | | UUUCCUACAAU |
| | | | | | | TGTCTGTTAGGC | | | CCAUGUGUCUG |
| | | | | | | AATCTCACGGAC | | | UUAGGCAAUCU |
| | | | | | | CTGGGGCTTTGC | | | CACGGACCUGG |
| | | | | | | TTATATGCC | | | GGCUUUGCUUA |
| | | | | | | [SEQ ID NO: 1719] | | | UAUGCC |
| | | | | | | | | | [SEQ ID NO: 1916] |
| 967 | miR- | -2.64307 | 0.113083 | ACTGATGTA | TGGCATATA | GAGCTCAGTCA | ACUGAUGU | UGGCAUAU | GAGCUCAGUCA |
| | 190a_M | | | AGTATATG | CTTACATCA | AACCTGGATGCC | AAGUAUAU | ACUUACAU | AACCUGGAUGC |
| | | | | AACCA | AG | TTTTCTGCAGGC | GAACCA | CAAG | CUUUUCUGCAG |
| | | | | [SEQ ID | [SEQ ID | GTCTGTGACTGA | [SEQ ID | [SEQ ID | GCGUCUGUGAC |
| | | | | NO: 1619] | NO: 1642] | TGTAAGTATATG | NO: 1815] | NO: 1837] | UGAUGUAAGUA |
| | | | | | | AACCATGTTATT | | | UAUGAACCAUG |
| | | | | | | TAATCCATGGCA | | | UUAUUUAAUCC |
| | | | | | | TATACTTACATC | | | AUGGCAUAUAC |
| | | | | | | AAGCTACAGTCT | | | UUACAUCAAGC |
| | | | | | | CTTGCCCTGTCT | | | UACAGUCUCUU |
| | | | | | | CCGGGGGTTCCT | | | GCCCUGUCUCC |
| | | | | | | AATAAAG | | | GGGGGUUCCUA |
| | | | | | | [SEQ ID NO: 1720] | | | AUAAAG |
| | | | | | | | | | [SEQ ID NO: 1917] |
| 3302 | miR-190a | -2.64186 | 0.124524 | TTGAACAA | CCCATCAGC | GAGCTCAGTCA | UUGAACAA | CCCAUCAG | GAGCUCAGUCA |
| | | | | GGGGCTGA | CCCTTGTTC | AACCTGGATGCC | GGGGCUGA | CCCCUUGU | AACCUGGAUGC |
| | | | | TTTGGG | CC | TTTTCTGCAGGC | UUUGGG | UCCC | CUUUUCUGCAG |
| | | | | [SEQ ID | [SEQ ID | CTCTGTGTTGAA | [SEQ ID | [SEQ ID | GCCUCUGUGUU |
| | | | | NO: 688] | NO: 1643] | CAAGGGGCTGA | NO: 1216] | NO: 1838] | GAACAAGGGGC |
| | | | | | | TTTGGGTGTTAT | | | UGAUUUGGGUG |
| | | | | | | TTAATCCACCCA | | | UUAUUUAAUCC |
| | | | | | | TCAGCCCCTTGT | | | ACCCAUCAGCC |
| | | | | | | TCCCCTACAGTG | | | CCUUGUUCCCC |
| | | | | | | TCTTGCCCTGTC | | | UACAGUGUCUU |
| | | | | | | TCCGGGGGTTCC | | | GCCCUGUCUCC |
| | | | | | | TAATAAAG | | | GGGGGUUCCUA |
| | | | | | | [SEQ ID NO: 1721] | | | AUAAAG |
| | | | | | | | | | [SEQ ID NO: 1918] |
| 3302 | miR-130a | -2.62809 | 0.136636 | TTGAACAA | CGCAAATC | GCAGGGCCGGC | UUGAACAA | CGCAAAUC | GCAGGGCCGGC |
| | | | | GGGGCTGA | AGACCCTTG | ATGCCTCTGCTG | GGGGCUGA | AGACCCUU | AUGCCUCUGCU |
| | | | | TTTGGG | TTCAC | CTGGCCACGCA | UUUGGG | GUUCAC | GCUGGCCACGC |
| | | | | [SEQ ID | [SEQ ID | AATCAGACCCTT | [SEQ ID | [SEQ ID | AAAUCAGACCC |
| | | | | NO: 688] | NO: 1644] | GTTCACCTGTCT | NO: 1216] | NO: 1839] | UUGUUCACCUG |
| | | | | | | GCACCTGTCACT | | | UCUGCACCUGU |
| | | | | | | AGTTGAACAAG | | | CACUAGUUGAA |
| | | | | | | GGGCTGATTTGG | | | CAAGGGGCUGA |
| | | | | | | GTGGCCGTGTAG | | | UUUGGGUGGCC |
| | | | | | | TGCTACCCAGCG | | | GUGUAGUGCUA |
| | | | | | | CTGGCTGCCTCC | | | CCCAGCGCUGG |
| | | | | | | TCAGCATTG | | | CUGCCUCCUCA |
| | | | | | | [SEQ ID NO: 1722] | | | GCAUUG |
| | | | | | | | | | [SEQ ID NO: 1919] |
| 1755 | miR-1-1_M | -2.62482 | 0.169485 | TCGGGTTGA | CTCACTTCA | CATGCAGACTGC | UCGGGUUG | CUCACUUC | CAUGCAGACUG |
| | | | | AATCTGAA | GATTTCAAC | CTGCTTGGGCTC | AAAUCUGA | AGAUUUCA | CCUGCUUGGGC |
| | | | | GTGTG | GACGA | ACTTCAGATTTC | AGUGUG | ACGACGA | UCACUUCAGAU |
| | | | | [SEQ ID | [SEQ ID | AACGACGATAT | [SEQ ID | [SEQ ID | UUCAACGACGA |
| | | | | NO: 657] | NO: 1645] | GGACCTGCTAA | NO: 1185] | NO: 1840] | UAUGGACCUGC |
| | | | | | | GCTATCGGGTTG | | | UAAGCUAUCGG |
| | | | | | | AAATCTGAAGT | | | GUUGAAAUCUG |
| | | | | | | GTGCTCAGGCCG | | | AAGUGUGCUCA |
| | | | | | | GGACCTCTTCCG | | | GGCCGGGACCU |
| | | | | | | CCGCACTGAGG | | | CUUCCGCCGCA |
| | | | | | | GGCACTCCACAC | | | CUGAGGGGCAC |
| | | | | | | CACGGGGGCC | | | UCCACACCACG |
| | | | | | | [SEQ ID NO: 1723] | | | GGGGCC |
| | | | | | | | | | [SEQ ID NO: 1920] |
| 3302 | miR-100_M | -2.62238 | -0.19177 | TTGAACAA | CCCAAACC | CCCAAAAGAGA | UUGAACAA | CCCAAACC | CCCAAAAGAGA |
| | | | | GGGGCTGA | AGACCCTTG | GAAGATATTGAT | GGGGCUGA | AGACCCUU | GAAGAUAUUGA |
| | | | | TTTGGG | CTCAT | GCCTGTTGCCAC | UUUGGG | GCUCAU | UGCCUGUUGCC |
| | | | | [SEQ ID | [SEQ ID | ATTGAACAAGG | [SEQ ID | [SEQ ID | ACAUUGAACAA |
| | | | | NO: 688] | NO: 1638] | GGCTGATTTGGG | NO: 1216] | NO: 1833] | GGGGCUGAUUU |
| | | | | | | GTATTAGTCCGC | | | GGGGUAUUAGU |
| | | | | | | CCAAACCAGAC | | | CCGCCCAAACC |
| | | | | | | CCTTGCTCATTG | | | AGACCCUUGCU |
| | | | | | | TGTCTGTTAGGC | | | CAUUGUGUCUG |
| | | | | | | TATTCCACGGAC | | | UUAGGCUAUUC |
| | | | | | | CTGGGGCTTTGC | | | CACGGACCUGG |
| | | | | | | TTATATGCC | | | GGCUUUGCUUA |
| | | | | | | [SEQ ID NO: 1724] | | | UAUGCC |
| | | | | | | | | | [SEQ ID NO: 1921] |
| 1755 | miR-122_M | -2.60043 | -0.03541 | TCGGGTTGA | CACACTTCA | GGCTACAGAGTT | UCGGGUUG | CACACUUC | GGCUACAGAGU |
| | | | | AATCTGAA | GACTTCAAC | TGCTTAGCAGAG | AAAUCUGA | AGACUUCA | UUGCUUAGCAG |
| | | | | GTGTG | CATA | CTGTCGGGTTGA | AGUGUG | ACCAUA | AGCUGUCGGGU |
| | | | | [SEQ ID | [SEQ ID | AATCTGAAGTGT | [SEQ ID | [SEQ ID | UGAAAUCUGAA |
| | | | | NO: 657] | NO: 1646] | GTGTCTAAACTA | NO: 1185] | NO: 1841] | GUGUGUGUCUA |
| | | | | | | TCACACTTCAGA | | | AACUAUCACAC |
| | | | | | | CTTCAACCATAT | | | UUCAGACUUCA |
| | | | | | | AGCTACTGCTAG | | | ACCAUAUAGCU |
| | | | | | | GCCATCCTTCCC | | | ACUGCUAGGCC |
| | | | | | | TCGATAAATGTC | | | AUCCUUCCCUC |
| | | | | | | TTGGCATCGTTT | | | GAUAAAUGUCU |
| | | | | | | GCTTTG | | | UGGCAUCGUUU |
| | | | | | | [SEQ ID NO: 1725] | | | GCUUUG |
| | | | | | | | | | [SEQ ID NO: 1922] |
| 1755 | miR-1-1 | -2.5734 | -0.10352 | TCGGGTTGA | CTCACTTCA | CATGCAGACTGC | UCGGGUUG | CUCACUUC | CAUGCAGACUG |
| | | | | AATCTGAA | GATTTCAAC | CTGCTTGGGCTC | AAAUCUGA | AGAUUUCA | CCUGCUUGGGC |
| | | | | GTGTG | GACGA | ACTTCAGATTTC | AGUGUG | ACGACGA | UCACUUCAGAU |
| | | | | [SEQ ID | [SEQ ID | AACGACGATAT | [SEQ ID | [SEQ ID | UUCAACGACGA |
| | | | | NO: 657] | NO: 1645] | GGACCTGCTAA | NO: 1185] | NO: 1840] | UAUGGACCUGC |
| | | | | | | GCTATCGGGTTG | | | UAAGCUAUCGG |
| | | | | | | AAATCTGAAGT | | | GUUGAAAUCUG |
| | | | | | | GTGCTCAGGCCG | | | AAGUGUGCUCA |
| | | | | | | GGACCTCTCTCG | | | GGCCGGGACCU |
| | | | | | | CCGCACTGAGG | | | CUCUCGCCGCA |
| | | | | | | GGCACTCCACAC | | | CUGAGGGGCAC |
| | | | | | | CACGGGGGCC | | | UCCACACCACG |
| | | | | | | [SEQ ID NO: 1726] | | | GGGGCC |
| | | | | | | | | | [SEQ ID NO: 1923] |
| 3302 | miR-1-1_M | -2.57066 | 0.05742 | TTGAACAA | CGCAAATC | CATGCAGACTGC | UUGAACAA | CGCAAAUC | CAUGCAGACUG |
| | | | | GGGGCTGA | AGCCCCTTG | CTGCTTGGGCGC | GGGGCUGA | AGCCCCUU | CCUGCUUGGGC |
| | | | | TTTGGG | TCGCAA | AAATCAGCCCCT | UUUGGG | GUCGCAA | GCAAAUCAGCC |
| | | | | [SEQ ID | [SEQ ID | TGTCGCAATATG | [SEQ ID | [SEQ ID | CCUUGUCGCAA |
| | | | | NO: 688] | NO: 1647] | GACCTGCTAAGC | NO: 1216] | NO: 1842] | UAUGGACCUGC |
| | | | | | | TATTGAACAAG | | | UAAGCUAUUGA |
| | | | | | | GGGCTGATTTGG | | | ACAAGGGGCUG |
| | | | | | | GCTCAGGCCGG | | | AUUUGGGCUCA |
| | | | | | | GACCTCTTCCGC | | | GGCCGGGACCU |
| | | | | | | CGCACTGAGGG | | | CUUCCGCCGCA |
| | | | | | | GCACTCCACACC | | | CUGAGGGGCAC |
| | | | | | | ACGGGGGCC | | | UCCACACCACG |
| | | | | | | [SEQ ID NO: 1727] | | | GGGGCC |
| | | | | | | | | | [SEQ ID NO: 1924] |
| 1755 | miR-130a | -2.56989 | 0.011195 | TCGGGTTGA | CTCACTTCA | GCAGGGCCGGC | UCGGGUUG | CUCACUUC | GCAGGGCCGGC |
| | | | | AATCTGAA | GCTTTCAAT | ATGCCTCTGCTG | AAAUCUGA | AGCUUUCA | AUGCCUCUGCU |
| | | | | GTGTG | TCGC | CTGGCCACTCAC | AGUGUG | AUUCGC | GCUGGCCACUC |
| | | | | [SEQ ID | [SEQ ID | TTCAGCTTTCAA | [SEQ ID | [SEQ ID | ACUUCAGCUUU |
| | | | | NO: 657] | NO: 1648] | TTCGCCTGTCTG | NO: 1185] | NO: 1843] | CAAUUCGCCUG |
| | | | | | | CACCTGTCACTA | | | UCUGCACCUGU |
| | | | | | | GTCGGGTTGAA | | | CACUAGUCGGG |
| | | | | | | ATCTGAAGTGTG | | | UUGAAAUCUGA |
| | | | | | | TGGCCGTGTAGT | | | AGUGUGUGGCC |
| | | | | | | GCTACCCAGCGC | | | GUGUAGUGCUA |
| | | | | | | TGGCTGCCTCCT | | | CCCAGCGCUGG |
| | | | | | | CAGCATTG | | | CUGCCUCCUCA |
| | | | | | | [SEQ ID NO: 1728] | | | GCAUUG |
| | | | | | | | | | [SEQ ID NO: 1925] |
| 3272 | miR-100_M | -2.56927 | -0.01914 | AGGACTGT | GCAATACG | CCCAAAAGAGA | AGGACUGU | GCAAUACG | CCCAAAAGAGA |
| | | | | AGGCAACA | TTTCCTACA | GAAGATATTGAT | AGGCAACA | UUUCCUAC | GAAGAUAUUGA |
| | | | | TATTGC | ATCCA | GCCTGTTGCCAC | UAUUGC | AAUCCA | UGCCUGUUGCC |
| | | | | [SEQ ID | [SEQ ID | AAGGACTGTAG | [SEQ ID | [SEQ ID | ACAAGGACUGU |
| | | | | NO: 1618] | NO: 1641] | GCAACATATTGC | NO: 1814] | NO: 1836] | AGGCAACAUAU |
| | | | | | | GTATTAGTCCGG | | | UGCGUAUUAGU |
| | | | | | | CAATACGTTTCC | | | CCGGCAAUACG |
| | | | | | | TACAATCCATGT | | | UUUCCUACAAU |
| | | | | | | GTCTGTTAGGCT | | | CCAUGUGUCUG |
| | | | | | | ATTCCACGGACC | | | UUAGGCUAUUC |
| | | | | | | TGGGGCTTTGCT | | | CACGGACCUGG |
| | | | | | | TATATGCC | | | GGCUUUGCUUA |
| | | | | | | [SEQ ID NO: 1729] | | | UAUGCC |
| | | | | | | | | | [SEQ ID NO: 1926] |
| 3301 | miR-130a | -2.55451 | -0.07529 | TGAACAAG | TGCCAAATC | GCAGGGCCGGC | UGAACAAG | UGCCAAAU | GCAGGGCCGGC |
| | | | | GGGCTGATT | ATCCCCTTG | ATGCCTCTGCTG | GGGCUGAU | CAUCCCCU | AUGCCUCUGCU |
| | | | | TGGGA | TTCC | CTGGCCATGCCA | UUGGGA | UGUUCC | GCUGGCCAUGC |
| | | | | [SEQ ID | [SEQ ID | AATCATCCCCTT | [SEQ ID | [SEQ ID | CAAAUCAUCCC |
| | | | | NO: 687] | NO: 1649] | GTTCCCTGTCTG | NO: 1215] | NO: 1844] | CUUGUUCCCUG |
| | | | | | | CACCTGTCACTA | | | UCUGCACCUGU |
| | | | | | | GTGAACAAGGG | | | CACUAGUGAAC |
| | | | | | | GCTGATTTGGGA | | | AAGGGGCUGAU |
| | | | | | | TGGCCGTGTAGT | | | UUGGGAUGGCC |
| | | | | | | GCTACCCAGCGC | | | GUGUAGUGCUA |
| | | | | | | TGGCTGCCTCCT | | | CCCAGCGCUGG |
| | | | | | | CAGCATTG | | | CUGCCUCCUCA |
| | | | | | | [SEQ ID NO: 1730] | | | GCAUUG |
| | | | | | | | | | [SEQ ID NO: 1927] |
| 2943 | miR-1-1 | -2.54936 | 0.148183 | TAGTAGAA | TGTCAGCCA | CATGCAGACTGC | UAGUAGAA | UGUCAGCC | CAUGCAGACUG |
| | | | | GGCTTTGGC | AAGCCTTCT | CTGCTTGGGTGT | GGCUUUGG | AAAGCCUU | CCUGCUUGGGU |
| | | | | TGAGA | CCCTA | CAGCCAAAGCC | CUGAGA | CUCCCUA | GUCAGCCAAAG |
| | | | | [SEQ ID | [SEQ ID | TTCTCCCTATAT | [SEQ ID | [SEQ ID | CCUUCUCCCUA |
| | | | | NO: 683] | NO: 1650] | GGACCTGCTAA | NO: 1211] | NO: 1845] | UAUGGACCUGC |
| | | | | | | GCTATAGTAGA | | | UAAGCUAUAGU |
| | | | | | | AGGCTTTGGCTG | | | AGAAGGCUUUG |
| | | | | | | AGACTCAGGCC | | | GCUGAGACUCA |
| | | | | | | GGGACCTCTCTC | | | GGCCGGGACCU |
| | | | | | | GCCGCACTGAG | | | CUCUCGCCGCA |
| | | | | | | GGGCACTCCAC | | | CUGAGGGGCAC |
| | | | | | | ACCACGGGGGC | | | UCCACACCACG |
| | | | | | | C | | | GGGGCC |
| | | | | | | [SEQ ID NO: 1731] | | | [SEQ ID NO: 1928] |
| 3338 | miR-1-1 | -2.52716 | -0.2585 | TACATGAG | TGAGTCTCA | CATGCAGACTGC | UACAUGAG | UGAGUCUC | CAUGCAGACUG |
| | | | | GATGCTGA | GCATCCTCA | CTGCTTGGGTGA | GAUGCUGA | AGCAUCCU | CCUGCUUGGGU |
| | | | | GACTGA | CGGTA | GTCTCAGCATCC | GACUGA | CACGGUA | GAGUCUCAGCA |
| | | | | [SEQ ID | [SEQ ID | TCACGGTATATG | [SEQ ID | [SEQ ID | UCCUCACGGUA |
| | | | | NO: 1620] | NO: 1651] | GACCTGCTAAGC | NO: 314] | NO: 1846] | UAUGGACCUGC |
| | | | | | | TATACATGAGG | (Same guide as | | UAAGCUAUACA |
| | | | | | | ATGCTGAGACTG | XD-14893) | | UGAGGAUGCUG |
| | | | | | | ACTCAGGCCGG | | | AGACUGACUCA |
| | | | | | | GACCTCTCTCGC | | | GGCCGGGACCU |
| | | | | | | CGCACTGAGGG | | | CUCUCGCCGCA |
| | | | | | | GCACTCCACACC | | | CUGAGGGGCAC |
| | | | | | | ACGGGGGCC | | | UCCACACCACG |
| | | | | | | [SEQ ID NO: 1732] | | | GGGGCC |
| | | | | | | | | | [SEQ ID NO: 1929] |
| 3302 | miR- | -2.52395 | 0.249656 | TTGAACAA | CCCATCAGC | GAGCTCAGTCA | UUGAACAA | CCCAUCAG | GAGCUCAGUCA |
| | 190a_M | | | GGGGCTGA | CCCTTGTTC | AACCTGGATGCC | GGGGCUGA | CCCCUUGU | AACCUGGAUGC |
| | | | | TTTGGG | CC | TTTTCTGCAGGC | UUUGGG | UCCC | CUUUUCUGCAG |
| | | | | [SEQ ID | [SEQ ID | GTCTGTGTTGAA | [SEQ ID | [SEQ ID | GCGUCUGUGUU |
| | | | | NO: 688] | NO: 1643] | CAAGGGGCTGA | NO: 1216] | NO: 1838] | GAACAAGGGGC |
| | | | | | | TTTGGGTGTTAT | | | UGAUUUGGGUG |
| | | | | | | TTAATCCACCCA | | | UUAUUUAAUCC |
| | | | | | | TCAGCCCCTTGT | | | ACCCAUCAGCC |
| | | | | | | TCCCCTACAGTC | | | CCUUGUUCCCC |
| | | | | | | TCTTGCCCTGTC | | | UACAGUCUCUU |
| | | | | | | TCCGGGGGTTCC | | | GCCCUGUCUCC |
| | | | | | | TAATAAAG | | | GGGGGUUCCUA |
| | | | | | | [SEQ ID NO: 1733] | | | AUAAAG |
| | | | | | | | | | [SEQ ID NO: 1930] |
| 3302 | miR-155E | -2.52291 | 0.018122 | TTGAACAA | CCCAAATC | CTGGAGGCTTGC | UUGAACAA | CCCAAAUC | CUGGAGGCUUG |
| | | | | GGGGCTGA | GCCCTTGTT | TTTGGGCTGTAT | GGGGCUGA | GCCCUUGU | CUUUGGGCUGU |
| | | | | TTTGGG | CAA | GCTGTTGAACAA | UUUGGG | UCAA | AUGCUGUUGAA |
| | | | | [SEQ ID | [SEQ ID | GGGGCTGATTTG | [SEQ ID | [SEQ ID | CAAGGGGCUGA |
| | | | | NO: 688] | NO: 1652] | GGTTTTGGCCTC | NO: 1216] | NO: 1847] | UUUGGGUUUUG |
| | | | | | | TGACTGACCCAA | | | GCCUCUGACUG |
| | | | | | | ATCGCCCTTGTT | | | ACCCAAAUCGC |
| | | | | | | CAACAGGACAA | | | CCUUGUUCAAC |
| | | | | | | GGCCCTTTATCA | | | AGGACAAGGCC |
| | | | | | | GCACTCACATGG | | | CUUUAUCAGCA |
| | | | | | | AACAAATGGCC | | | CUCACAUGGAA |
| | | | | | | ACCGTGGG | | | CAAAUGGCCAC |
| | | | | | | [SEQ ID NO: 1734] | | | CGUGGG |
| | | | | | | | | | [SEQ ID NO: 1931] |
| 3302 | miR-1-1 | -2.51939 | -0.06675 | TTGAACAA | CGCAAATC | CATGCAGACTGC | UUGAACAA | CGCAAAUC | CAUGCAGACUG |
| | | | | GGGGCTGA | AGCCCCTTG | CTGCTTGGGCGC | GGGGCUGA | AGCCCCUU | CCUGCUUGGGC |
| | | | | TTTGGG | TCGCAA | AAATCAGCCCCT | UUUGGG | GUCGCAA | GCAAAUCAGCC |
| | | | | [SEQ ID | [SEQ ID | TGTCGCAATATG | [SEQ ID | [SEQ ID | CCUUGUCGCAA |
| | | | | NO: 688] | NO: 1647] | GACCTGCTAAGC | NO: 1216] | NO: 1842] | UAUGGACCUGC |
| | | | | | | TATTGAACAAG | | | UAAGCUAUUGA |
| | | | | | | GGGCTGATTTGG | | | ACAAGGGGCUG |
| | | | | | | GCTCAGGCCGG | | | AUUUGGGCUCA |
| | | | | | | GACCTCTCTCGC | | | GGCCGGGACCU |
| | | | | | | CGCACTGAGGG | | | CUCUCGCCGCA |
| | | | | | | GCACTCCACACC | | | CUGAGGGGCAC |
| | | | | | | ACGGGGGCC | | | UCCACACCACG |
| | | | | | | [SEQ ID NO: 1735] | | | GGGGCC |
| | | | | | | | | | [SEQ ID NO: 1932] |
| 2586 | miR-155E | -2.5179 | -0.10172 | TAGATTCAG | CCAAGTTCA | CTGGAGGCTTGC | UAGAUUCA | CCAAGUUC | CUGGAGGCUUG |
| | | | | AAGTAGAA | CTCTGAATC | TTTGGGCTGTAT | GAAGUAGA | ACUCUGAA | CUUUGGGCUGU |
| | | | | CTTGG | TA | GCTGTAGATTCA | ACUUGG | UCUA | AUGCUGUAGAU |
| | | | | [SEQ ID | [SEQ ID | GAAGTAGAACT | [SEQ ID | [SEQ ID | UCAGAAGUAGA |
| | | | | NO: 1621] | NO: 1653] | TGGTTTTGGCCT | NO: 1816] | NO: 1848] | ACUUGGUUUUG |
| | | | | | | CTGACTGACCAA | | | GCCUCUGACUG |
| | | | | | | GTTCACTCTGAA | | | ACCAAGUUCAC |
| | | | | | | TCTACAGGACA | | | UCUGAAUCUAC |
| | | | | | | AGGCCCTTTATC | | | AGGACAAGGCC |
| | | | | | | AGCACTCACATG | | | CUUUAUCAGCA |
| | | | | | | GAACAAATGGC | | | CUCACAUGGAA |
| | | | | | | CACCGTGGG | | | CAAAUGGCCAC |
| | | | | | | [SEQ ID NO: 1736] | | | CGUGGG |
| | | | | | | | | | [SEQ ID NO: 1933] |
| 3341 | miR-1-1 | -2.50291 | -0.1115 | ATAGACAT | GACTCAGC | CATGCAGACTGC | AUAGACAU | GACUCAGC | CAUGCAGACUG |
| | | | | GAGGATGC | ATCCTCATG | CTGCTTGGGGAC | GAGGAUGC | AUCCUCAU | CCUGCUUGGGG |
| | | | | TGAGAC | TGATAT | TCAGCATCCTCA | UGAGAC | GUGAUAU | ACUCAGCAUCC |
| | | | | [SEQ ID | [SEQ ID | TGTGATATTATG | [SEQ ID | [SEQ ID | UCAUGUGAUAU |
| | | | | NO: 1617] | NO: 1637] | GACCTGCTAAGC | NO: 1813] | NO: 1832] | UAUGGACCUGC |
| | | | | | | TAATAGACATG | | | UAAGCUAAUAG |
| | | | | | | AGGATGCTGAG | | | ACAUGAGGAUG |
| | | | | | | ACCTCAGGCCG | | | CUGAGACCUCA |
| | | | | | | GGACCTCTCTCG | | | GGCCGGGACCU |
| | | | | | | CCGCACTGAGG | | | CUCUCGCCGCA |
| | | | | | | GGCACTCCACAC | | | CUGAGGGGCAC |
| | | | | | | CACGGGGGCC | | | UCCACACCACG |
| | | | | | | [SEQ ID NO: 1737] | | | GGGGCC |
| | | | | | | | | | [SEQ ID NO: 1934] |
| 1580 | miR-190a | -2.50168 | -0.06321 | ACTGGAATT | AGCTTCAG | GAGCTCAGTCA | ACUGGAAU | AGCUUCAG | GAGCUCAGUCA |
| | | | | TCTCTGAAC | AGAAATTC | AACCTGGATGCC | UUCUCUGA | AGAAAUUC | AACCUGGAUGC |
| | | | | TGCT | CAAG | TTTTCTGCAGGC | ACUGCU | CAAG | CUUUUCUGCAG |
| | | | | [SEQ ID | [SEQ ID | CTCTGTGACTGG | [SEQ ID | [SEQ ID | GCCUCUGUGAC |
| | | | | NO: 1622] | NO: 1654] | AATTTCTCTGAA | NO: 1817] | NO: 1849] | UGGAAUUUCUC |
| | | | | | | CTGCTTGTTATT | | | UGAACUGCUUG |
| | | | | | | TAATCCAAGCTT | | | UUAUUUAAUCC |
| | | | | | | CAGAGAAATTC | | | AAGCUUCAGAG |
| | | | | | | CAAGCTACAGT | | | AAAUUCCAAGC |
| | | | | | | GTCTTGCCCTGT | | | UACAGUGUCUU |
| | | | | | | CTCCGGGGGTTC | | | GCCCUGUCUCC |
| | | | | | | CTAATAAAG | | | GGGGGUUCCUA |
| | | | | | | [SEQ ID NO: 1738] | | | AUAAAG |
| | | | | | | | | | [SEQ ID NO: 1935] |
| 3332 | miR-122 | -2.50104 | -0.209 | AGGATGCT | ACATTATCA | GGCTACAGAGTT | AGGAUGCU | ACAUUAUC | GGCUACAGAGU |
| | | | | GAGACTGA | GTATCAGC | TCCTTAGCAGAG | GAGACUGA | AGUAUCAG | UUCCUUAGCAG |
| | | | | TAATGT | ATAAT | CTGAGGATGCTG | UAAUGU | CAUAAU | AGCUGAGGAUG |
| | | | | [SEQ ID | [SEQ ID | AGACTGATAAT | [SEQ ID | [SEQ ID | CUGAGACUGAU |
| | | | | NO: 1623] | NO: 1655] | GTTGTCTAAACT | NO: 1818] | NO: 1850] | AAUGUUGUCUA |
| | | | | | | ATACATTATCAG | | | AACUAUACAUU |
| | | | | | | TATCAGCATAAT | | | AUCAGUAUCAG |
| | | | | | | TAGCTACTGCTA | | | CAUAAUUAGCU |
| | | | | | | GGCAATCCTTCC | | | ACUGCUAGGCA |
| | | | | | | CTCGATAAATGT | | | AUCCUUCCCUC |
| | | | | | | CTTGGCATCGTT | | | GAUAAAUGUCU |
| | | | | | | TGCTTTG | | | UGGCAUCGUUU |
| | | | | | | [SEQ ID NO: 1739] | | | GCUUUG |
| | | | | | | | | | [SEQ ID NO: 1936] |
| 3133 | miR-100_M | -2.49525 | 0.238806 | TATGTCTTG | CAGTGACTC | CCCAAAAGAGA | UAUGUCUU | CAGUGACU | CCCAAAAGAGA |
| | | | | GCTTGATTC | ACGCCAAG | GAAGATATTGAT | GGCUUGAU | CACGCCAA | GAAGAUAUUGA |
| | | | | ACTG | CCATT | GCCTGTTGCCAC | UCACUG | GCCAUU | UGCCUGUUGCC |
| | | | | [SEQ ID | [SEQ ID | ATATGTCTTGGC | [SEQ ID | [SEQ ID | ACAUAUGUCUU |
| | | | | NO: 1624] | NO: 1656] | TTGATTCACTGG | NO: 1819] | NO: 1851] | GGCUUGAUUCA |
| | | | | | | TATTAGTCCGCA | | | CUGGUAUUAGU |
| | | | | | | GTGACTCACGCC | | | CCGCAGUGACU |
| | | | | | | AAGCCATTTGTG | | | CACGCCAAGCC |
| | | | | | | TCTGTTAGGCTA | | | AUUUGUGUCUG |
| | | | | | | TTCCACGGACCT | | | UUAGGCUAUUC |
| | | | | | | GGGGCTTTGCTT | | | CACGGACCUGG |
| | | | | | | ATATGCC | | | GGCUUUGCUUA |
| | | | | | | [SEQ ID NO: 1740] | | | UAUGCC |
| | | | | | | | | | [SEQ ID NO: 1937] |
| 3341 | miR-122 | -2.4857 | 0.187025 | ATAGACAT | GTCTCAGCA | GGCTACAGAGTT | AUAGACAU | GUCUCAGC | GGCUACAGAGU |
| | | | | GAGGATGC | TCATCATGT | TCCTTAGCAGAG | GAGGAUGC | AUCAUCAU | UUCCUUAGCAG |
| | | | | TGAGAC | CGCT | CTGATAGACATG | UGAGAC | GUCGCU | AGCUGAUAGAC |
| | | | | [SEQ ID | [SEQ ID | AGGATGCTGAG | [SEQ ID | [SEQ ID | AUGAGGAUGCU |
| | | | | NO: 1617] | NO: 1657] | ACTGTCTAAACT | NO: 1813] | NO: 1852] | GAGACUGUCUA |
| | | | | | | ATGTCTCAGCAT | | | AACUAUGUCUC |
| | | | | | | CATCATGTCGCT | | | AGCAUCAUCAU |
| | | | | | | TAGCTACTGCTA | | | GUCGCUUAGCU |
| | | | | | | GGCAATCCTTCC | | | ACUGCUAGGCA |
| | | | | | | CTCGATAAATGT | | | AUCCUUCCCUC |
| | | | | | | CTTGGCATCGTT | | | GAUAAAUGUCU |
| | | | | | | TGCTTTG | | | UGGCAUCGUUU |
| | | | | | | [SEQ ID NO: 1741] | | | GCUUUG |
| | | | | | | | | | [SEQ ID NO: 1938] |
| 3341 | miR-132 | -2.48196 | 0.14613 | ATAGACAT | GCCTCAGC | GCCGTCCGCGCG | AUAGACAU | GCCUCAGC | GCCGUCCGCGC |
| | | | | GAGGATGC | ATCATAATG | CCCCGCCCCCGC | GAGGAUGC | AUCAUAAU | GCCCCGCCCCC |
| | | | | TGAGAC | TCTAT | GTCTCCAGGGGC | UGAGAC | GUCUAU | GCGUCUCCAGG |
| | | | | [SEQ ID | [SEQ ID | CTCAGCATCATA | [SEQ ID | [SEQ ID | GGCCUCAGCAU |
| | | | | NO: 1617] | NO: 1658] | ATGTCTATCTGT | NO: 1813] | NO: 1853] | CAUAAUGUCUA |
| | | | | | | GGGAACTGGAG | | | UCUGUGGGAAC |
| | | | | | | GATAGACATGA | | | UGGAGGAUAGA |
| | | | | | | GGATGCTGAGA | | | CAUGAGGAUGC |
| | | | | | | CCCCCGCAGCAC | | | UGAGACCCCCG |
| | | | | | | GCCCACGCGCC | | | CAGCACGCCCA |
| | | | | | | GCGCCACGCCG | | | CGCGCCGCGCC |
| | | | | | | CGCCCCGAGCC | | | ACGCCGCGCCC |
| | | | | | | [SEQ ID NO: 1742] | | | CGAGCC |
| | | | | | | | | | [SEQ ID NO: 1939] |
| 3330 | miR-1-1_M | -2.47751 | 0.392579 | TATGCTGAG | CGACATTAT | CATGCAGACTGC | UAUGCUGA | CGACAUUA | CAUGCAGACUG |
| | | | | ACTGATAAT | CAGTCTCAG | CTGCTTGGGCGA | GACUGAUA | UCAGUCUC | CCUGCUUGGGC |
| | | | | GTGG | GAATA | CATTATCAGTCT | AUGUGG | AGGAAUA | GACAUUAUCAG |
| | | | | [SEQ ID | [SEQ ID | CAGGAATATAT | [SEQ ID | [SEQ ID | UCUCAGGAAUA |
| | | | | NO: 1614] | NO: 1659] | GGACCTGCTAA | NO: 1811] | NO: 1854] | UAUGGACCUGC |
| | | | | | | GCTATATGCTGA | | | UAAGCUAUAUG |
| | | | | | | GACTGATAATGT | | | CUGAGACUGAU |
| | | | | | | GGCTCAGGCCG | | | AAUGUGGCUCA |
| | | | | | | GGACCTCTTCCG | | | GGCCGGGACCU |
| | | | | | | CCGCACTGAGG | | | CUUCCGCCGCA |
| | | | | | | GGCACTCCACAC | | | CUGAGGGGCAC |
| | | | | | | CACGGGGGCC | | | UCCACACCACG |
| | | | | | | [SEQ ID NO: 1743] | | | GGGGCC |
| | | | | | | | | | [SEQ ID NO: 1940] |
| 3255 | miR-144 | -2.47679 | -0.08595 | ATTGCGTGG | ACAAGCTT | TCAAGCCATGCT | AUUGCGUG | ACAAGCUU | UCAAGCCAUGC |
| | | | | AGTAAGCT | ACTGCCAC | TCCTGTGCCCCC | GAGUAAGC | ACUGCCAC | UUCCUGUGCCC |
| | | | | GGTGG | GCAAT | AGTGGGGCCCT | UGGUGG | GCAAU | CCAGUGGGGCC |
| | | | | [SEQ ID | [SEQ ID | GGCTACAAGCTT | [SEQ ID | [SEQ ID | CUGGCUACAAG |
| | | | | NO: 617] | NO: 1660] | ACTGCCACGCA | NO: 306] | NO: 1855] | CUUACUGCCAC |
| | | | | | | ATAGTTTGCGAT | (Same guide as | | GCAAUAGUUUG |
| | | | | | | GAGACACATTG | XD-14889) | | CGAUGAGACAC |
| | | | | | | CGTGGAGTAAG | | | AUUGCGUGGAG |
| | | | | | | CTGGTAGTCCGG | | | UAAGCUGGUAG |
| | | | | | | GCACCCCCAGCT | | | UCCGGGCACCC |
| | | | | | | CTGGAGCCTGAC | | | CCAGCUCUGGA |
| | | | | | | AAGGAGGACA | | | GCCUGACAAGG |
| | | | | | | [SEQ ID NO: 1744] | | | AGGACA |
| | | | | | | | | | [SEQ ID NO: 1941] |
| 1755 | miR-100 M | -2.4723 | -0.07055 | TCGGGTTGA | CACACTCCA | CCCAAAAGAGA | UCGGGUUG | CACACUCC | CCCAAAAGAGA |
| | | | | AATCTGAA | GCTTTCAAA | GAAGATATTGAT | AAAUCUGA | AGCUUUCA | GAAGAUAUUGA |
| | | | | GTGTG | CCGT | GCCTGTTGCCAC | AGUGUG | AACCGU | UGCCUGUUGCC |
| | | | | SEQ ID | [SEQ ID | ATCGGGTTGAA | [SEQ ID | [SEQ ID | ACAUCGGGUUG |
| | | | | NO: 657] | NO: 1640] | ATCTGAAGTGTG | NO: 1185] | NO: 1835] | AAAUCUGAAGU |
| | | | | | | GTATTAGTCCGC | | | GUGGUAUUAGU |
| | | | | | | ACACTCCAGCTT | | | CCGCACACUCC |
| | | | | | | TCAAACCGTTGT | | | AGCUUUCAAAC |
| | | | | | | GTCTGTTAGGCT | | | CGUUGUGUCUG |
| | | | | | | ATTCCACGGACC | | | UUAGGCUAUUC |
| | | | | | | TGGGGCTTTGCT | | | CACGGACCUGG |
| | | | | | | TATATGCC | | | GGCUUUGCUUA |
| | | | | | | [SEQ ID NO: 1745] | | | UAUGCC |
| | | | | | | | | | [SEQ ID NO: 1942] |
| 2586 | miR- | -2.46486 | 0.014777 | TAGATTCAG | CCATTCTAC | GAGCTCAGTCA | UAGAUUCA | CCAUUCUA | GAGCUCAGUCA |
| | 190a_M | | | AAGTAGAA | TTCTGAATC | AACCTGGATGCC | GAAGUAGA | CUUCUGAA | AACCUGGAUGC |
| | | | | CTTGG | CC | TTTTCTGCAGGC | ACUUGG | UCCC | CUUUUCUGCAG |
| | | | | SEQ ID | [SEQ ID | GTCTGTGTAGAT | [SEQ ID | [SEQ ID | GCGUCUGUGUA |
| | | | | NO: 1621] | NO: 1661] | TCAGAAGTAGA | NO: 1816] | NO: 1856] | GAUUCAGAAGU |
| | | | | | | ACTTGGTGTTAT | | | AGAACUUGGUG |
| | | | | | | TTAATCCACCAT | | | UUAUUUAAUCC |
| | | | | | | TCTACTTCTGAA | | | ACCAUUCUACU |
| | | | | | | TCCCCTACAGTC | | | UCUGAAUCCCC |
| | | | | | | TCTTGCCCTGTC | | | UACAGUCUCUU |
| | | | | | | TCCGGGGGTTCC | | | GCCCUGUCUCC |
| | | | | | | TAATAAAG | | | GGGGGUUCCUA |
| | | | | | | [SEQ ID NO: 1746] | | | AUAAAG |
| | | | | | | | | | [SEQ ID NO: 1943] |
| 2586 | miR-1-1_M | -2.46317 | 0.179187 | TAGATTCAG | CGAAGTTCT | CATGCAGACTGC | UAGAUUCA | CGAAGUUC | CAUGCAGACUG |
| | | | | AAGTAGAA | ACTTCTGAA | CTGCTTGGGCGA | GAAGUAGA | UACUUCUG | CCUGCUUGGGC |
| | | | | CTTGG | CGCTA | AGTTCTACTTCT | ACUUGG | AACGCUA | GAAGUUCUACU |
| | | | | [SEQ ID | [SEQ ID | GAACGCTATATG | SEQ ID | [SEQ ID | UCUGAACGCUA |
| | | | | NO: 1621] | NO: 1662] | GACCTGCTAAGC | NO: 1816] | NO: 1857] | UAUGGACCUGC |
| | | | | | | TATAGATTCAGA | | | UAAGCUAUAGA |
| | | | | | | AGTAGAACTTG | | | UUCAGAAGUAG |
| | | | | | | GCTCAGGCCGG | | | AACUUGGCUCA |
| | | | | | | GACCTCTTCCGC | | | GGCCGGGACCU |
| | | | | | | CGCACTGAGGG | | | CUUCCGCCGCA |
| | | | | | | GCACTCCACACC | | | CUGAGGGGCAC |
| | | | | | | ACGGGGGCC | | | UCCACACCACG |
| | | | | | | [SEQ ID NO: 1747] | | | GGGGCC |
| | | | | | | | | | [SEQ ID NO: 1944] |
| 3272 | miR-1-1_M | -2.45517 | 0.050153 | AGGACTGT | GGAATATG | CATGCAGACTGC | AGGACUGU | GGAAUAUG | CAUGCAGACUG |
| | | | | AGGCAACA | TTGCCTACA | CTGCTTGGGGGA | AGGCAACA | UUGCCUAC | CCUGCUUGGGG |
| | | | | TATTGC | GCGCCT | ATATGTTGCCTA | UAUUGC | AGCGCCU | GAAUAUGUUGC |
| | | | | SEQ ID | SEQ ID | CAGCGCCTTATG | [SEQ ID | [SEQ ID | CUACAGCGCCU |
| | | | | NO: 1618] | NO: 1663] | GACCTGCTAAGC | NO: 1814] | NO: 1858] | UAUGGACCUGC |
| | | | | | | TAAGGACTGTA | | | UAAGCUAAGGA |
| | | | | | | GGCAACATATTG | | | CUGUAGGCAAC |
| | | | | | | CCTCAGGCCGG | | | AUAUUGCCUCA |
| | | | | | | GACCTCTTCCGC | | | GGCCGGGACCU |
| | | | | | | CGCACTGAGGG | | | CUUCCGCCGCA |
| | | | | | | GCACTCCACACC | | | CUGAGGGGCAC |
| | | | | | | ACGGGGGCC | | | UCCACACCACG |
| | | | | | | [SEQ ID NO: 1748] | | | GGGGCC |
| | | | | | | | | | [SEQ ID NO: 1945] |
| 2943 | miR-1-1_M | -2.45216 | 0.338577 | TAGTAGAA | TGTCAGCCA | CATGCAGACTGC | UAGUAGAA | UGUCAGCC | CAUGCAGACUG |
| | | | | GGCTTTGGC | AAGCCTTCT | CTGCTTGGGTGT | GGCUUUGG | AAAGCCUU | CCUGCUUGGGU |
| | | | | TGAGA | CCCTA | CAGCCAAAGCC | CUGAGA | CUCCCUA | GUCAGCCAAAG |
| | | | | SEQ ID | [SEQ ID | TTCTCCCTATAT | [SEQ ID | [SEQ ID | CCUUCUCCCUA |
| | | | | NO: 683] | NO: 1650] | GGACCTGCTAA | NO: 1211] | NO: 1845] | UAUGGACCUGC |
| | | | | | | GCTATAGTAGA | | | UAAGCUAUAGU |
| | | | | | | AGGCTTTGGCTG | | | AGAAGGCUUUG |
| | | | | | | AGACTCAGGCC | | | GCUGAGACUCA |
| | | | | | | GGGACCTCTTCC | | | GGCCGGGACCU |
| | | | | | | GCCGCACTGAG | | | CUUCCGCCGCA |
| | | | | | | GGGCACTCCAC | | | CUGAGGGGCAC |
| | | | | | | ACCACGGGGGC | | | UCCACACCACG |
| | | | | | | C | | | GGGGCC |
| | | | | | | [SEQ ID NO: 1749] | | | [SEQ ID NO: 1946] |
| 3043 | miR- | -2.44458 | 0.289334 | TTTGGTGCA | AGCGTTTGT | GAGCTCAGTCA | UUUGGUGC | AGCGUUUG | GAGCUCAGUCA |
| | 190a M | | | AAACAAAC | TTTGCACCA | AACCTGGATGCC | AAAACAAA | UUUUGCAC | AACCUGGAUGC |
| | | | | AGGCT | CC | TTTTCTGCAGGC | CAGGCU | CACC | CUUUUCUGCAG |
| | | | | [SEQ ID | [SEQ ID | GTCTGTGTTTGG | [SEQ ID | [SEQ ID | GCGUCUGUGUU |
| | | | | NO: 1615] | NO: 1664] | TGCAAAACAAA | NO: 1812] | NO: 1859] | UGGUGCAAAAC |
| | | | | | | CAGGCTTGTTAT | | | AAACAGGCUUG |
| | | | | | | TTAATCCAAGCG | | | UUAUUUAAUCC |
| | | | | | | TTTGTTTTGCAC | | | AAGCGUUUGUU |
| | | | | | | CACCCTACAGTC | | | UUGCACCACCC |
| | | | | | | TCTTGCCCTGTC | | | UACAGUCUCUU |
| | | | | | | TCCGGGGGTTCC | | | GCCCUGUCUCC |
| | | | | | | TAATAAAG | | | GGGGGUUCCUA |
| | | | | | | [SEQ ID NO: 1750] | | | AUAAAG |
| | | | | | | | | | [SEQ ID NO: 1947] |
| 1578 | miR-100 | -2.43871 | -0.43493 | TGGAATTTC | ACAGCAAT | CCCAAAAGAGA | UGGAAUUU | ACAGCAAU | CCCAAAAGAGA |
| | | | | TCTGAACTG | TCCGAGAA | GAAGATATTGA | CUCUGAAC | UCCGAGAA | GAAGAUAUUGA |
| | | | | CTGT | ACTCCT | GGCCTGTTGCCA | UGCUGU | ACUCCU | GGCCUGUUGCC |
| | | | | [SEQ ID | [SEQ ID | CATGGAATTTCT | [SEQ ID | [SEQ ID | ACAUGGAAUUU |
| | | | | NO: 1626] | NO: 1665] | CTGAACTGCTGT | NO: 1820] | NO: 1860] | CUCUGAACUGC |
| | | | | | | GTATTAGTCCGA | | | UGUGUAUUAGU |
| | | | | | | CAGCAATTCCGA | | | CCGACAGCAAU |
| | | | | | | GAAACTCCTTGT | | | UCCGAGAAACU |
| | | | | | | GTCTGTTAGGCA | | | CCUUGUGUCUG |
| | | | | | | ATCTCACGGACC | | | UUAGGCAAUCU |
| | | | | | | TGGGGCTTTGCT | | | CACGGACCUGG |
| | | | | | | TATATGCC | | | GGCUUUGCUUA |
| | | | | | | [SEQ ID NO: 1751] | | | UAUGCC |
| | | | | | | | | | [SEQ ID NO: 1948] |
| 3133 | miR-122_M | -2.43848 | 0.197681 | TATGTCTTG | CAGTGAAT | GGCTACAGAGTT | UAUGUCUU | CAGUGAAU | GGCUACAGAGU |
| | | | | GCTTGATTC | CAAACCAA | TGCTTAGCAGAG | GGCUUGAU | CAAACCAA | UUGCUUAGCAG |
| | | | | ACTG | GACCGA | CTGTATGTCTTG | UCACUG | GACCGA | AGCUGUAUGUC |
| | | | | [SEQ ID | [SEQ ID | GCTTGATTCACT | [SEQ ID | [SEQ ID | UUGGCUUGAUU |
| | | | | NO: 1624] | NO: 1666] | GTGTCTAAACTA | NO: 1819] | NO: 1861] | CACUGUGUCUA |
| | | | | | | TCAGTGAATCAA | | | AACUAUCAGUG |
| | | | | | | ACCAAGACCGA | | | AAUCAAACCAA |
| | | | | | | TAGCTACTGCTA | | | GACCGAUAGCU |
| | | | | | | GGCCATCCTTCC | | | ACUGCUAGGCC |
| | | | | | | CTCGATAAATGT | | | AUCCUUCCCUC |
| | | | | | | CTTGGCATCGTT | | | GAUAAAUGUCU |
| | | | | | | TGCTTTG | | | UGGCAUCGUUU |
| | | | | | | [SEQ ID NO: 1752] | | | GCUUUG |
| | | | | | | | | | [SEQ ID NO: 1949] |
| 3341 | miR-130a | -2.43802 | 0.12379 | ATAGACAT | GACTCAGC | GCAGGGCCGGC | AUAGACAU | GACUCAGC | GCAGGGCCGGC |
| | | | | GAGGATGC | ATACTCATG | ATGCCTCTGCTG | GAGGAUGC | AUACUCAU | AUGCCUCUGCU |
| | | | | TGAGAC | TTTAC | CTGGCCAGACTC | UGAGAC | GUUUAC | GCUGGCCAGAC |
| | | | | [SEQ ID | [SEQ ID | AGCATACTCATG | [SEQ ID | [SEQ ID | UCAGCAUACUC |
| | | | | NO: 1617] | NO: 1667] | TTTACCTGTCTG | NO: 1813] | NO: 1862] | AUGUUUACCUG |
| | | | | | | CACCTGTCACTA | | | UCUGCACCUGU |
| | | | | | | GATAGACATGA | | | CACUAGAUAGA |
| | | | | | | GGATGCTGAGA | | | CAUGAGGAUGC |
| | | | | | | CTGGCCGTGTAG | | | UGAGACUGGCC |
| | | | | | | TGCTACCCAGCG | | | GUGUAGUGCUA |
| | | | | | | CTGGCTGCCTCC | | | CCCAGCGCUGG |
| | | | | | | TCAGCATTG | | | CUGCCUCCUCA |
| | | | | | | [SEQ ID NO: 1753] | | | GCAUUG |
| | | | | | | | | | [SEQ ID NO: 1950] |
| 3330 | miR-130a | -2.43606 | 0.221874 | TATGCTGAG | CGACATTAT | GCAGGGCCGGC | UAUGCUGA | CGACAUUA | GCAGGGCCGGC |
| | | | | ACTGATAAT | CCGTCTCAG | ATGCCTCTGCTG | GACUGAUA | UCCGUCUC | AUGCCUCUGCU |
| | | | | GTGG | TATC | CTGGCCACGAC | AUGUGG | AGUAUC | GCUGGCCACGA |
| | | | | [SEQ ID | [SEQ ID | ATTATCCGTCTC | [SEQ ID | [SEQ ID | CAUUAUCCGUC |
| | | | | NO: 1614] | NO: 1668] | AGTATCCTGTCT | NO: 1811] | NO: 1863] | UCAGUAUCCUG |
| | | | | | | GCACCTGTCACT | | | UCUGCACCUGU |
| | | | | | | AGTATGCTGAG | | | CACUAGUAUGC |
| | | | | | | ACTGATAATGTG | | | UGAGACUGAUA |
| | | | | | | GTGGCCGTGTAG | | | AUGUGGUGGCC |
| | | | | | | TGCTACCCAGCG | | | GUGUAGUGCUA |
| | | | | | | CTGGCTGCCTCC | | | CCCAGCGCUGG |
| | | | | | | TCAGCATTG | | | CUGCCUCCUCA |
| | | | | | | [SEQ ID NO: 1754] | | | GCAUUG |
| | | | | | | | | | [SEQ ID NO: 1951] |
| 3255 | miR-130a | -2.43262 | 0.01754 | ATTGCGTGG | CGACCAGC | GCAGGGCCGGC | AUUGCGUG | CGACCAGC | GCAGGGCCGGC |
| | | | | AGTAAGCT | TTCCTCCAC | ATGCCTCTGCTG | GAGUAAGC | UUCCUCCA | AUGCCUCUGCU |
| | | | | GGTGG | GTAAC | CTGGCCACGACC | UGGUGG | CGUAAC | GCUGGCCACGA |
| | | | | [SEQ ID | [SEQ ID | AGCTTCCTCCAC | [SEQ ID | [SEQ ID | CCAGCUUCCUC |
| | | | | NO: 617] | NO: 1669] | GTAACCTGTCTG | NO: 306] | NO: 1864] | CACGUAACCUG |
| | | | | | | CACCTGTCACTA | (Same guide as | | UCUGCACCUGU |
| | | | | | | GATTGCGTGGA | XD-14889) | | CACUAGAUUGC |
| | | | | | | GTAAGCTGGTG | | | GUGGAGUAAGC |
| | | | | | | GTGGCCGTGTAG | | | UGGUGGUGGCC |
| | | | | | | TGCTACCCAGCG | | | GUGUAGUGCUA |
| | | | | | | CTGGCTGCCTCC | | | CCCAGCGCUGG |
| | | | | | | TCAGCATTG | | | CUGCCUCCUCA |
| | | | | | | [SEQ ID NO: 1755] | | | GCAUUG |
| | | | | | | | | | [SEQ ID NO: 1952] |
| 3302 | miR-132 | -2.43028 | 0.018802 | TTGAACAA | CACAAATC | GCCGTCCGCGCG | UUGAACAA | CACAAAUC | GCCGUCCGCGC |
| | | | | GGGGCTGA | AGCACATT | CCCCGCCCCCGC | GGGGCUGA | AGCACAUU | GCCCCGCCCCC |
| | | | | TTTGGG | GTTCAA | GTCTCCAGGGCA | UUUGGG | GUUCAA | GCGUCUCCAGG |
| | | | | [SEQ ID | [SEQ ID | CAAATCAGCAC | [SEQ ID | [SEQ ID | GCACAAAUCAG |
| | | | | NO: 688] | NO: 1670] | ATTGTTCAACTG | NO: 1216] | NO: 1865] | CACAUUGUUCA |
| | | | | | | TGGGAACTGGA | | | ACUGUGGGAAC |
| | | | | | | GGTTGAACAAG | | | UGGAGGUUGAA |
| | | | | | | GGGCTGATTTGG | | | CAAGGGGCUGA |
| | | | | | | GCCCCGCAGCA | | | UUUGGGCCCCG |
| | | | | | | CGCCCACGCGCC | | | CAGCACGCCCA |
| | | | | | | GCGCCACGCCG | | | CGCGCCGCGCC |
| | | | | | | CGCCCCGAGCC | | | ACGCCGCGCCC |
| | | | | | | [SEQ ID NO: 1756] | | | CGAGCC |
| | | | | | | | | | [SEQ ID NO: 1953] |
| 3133 | miR-130a | -2.42664 | 0.412413 | TATGTCTTG | CTGTGAATC | GCAGGGCCGGC | UAUGUCUU | CUGUGAAU | GCAGGGCCGGC |
| | | | | GCTTGATTC | ACGCCAAG | ATGCCTCTGCTG | GGCUUGAU | CACGCCAA | AUGCCUCUGCU |
| | | | | ACTG | ATATC | CTGGCCACTGTG | UCACUG | GAUAUC | GCUGGCCACUG |
| | | | | [SEQ ID | [SEQ ID | AATCACGCCAA | [SEQ ID | [SEQ ID | UGAAUCACGCC |
| | | | | NO: 1624] | NO: 1671] | GATATCCTGTCT | NO: 1819] | NO: 1866] | AAGAUAUCCUG |
| | | | | | | GCACCTGTCACT | | | UCUGCACCUGU |
| | | | | | | AGTATGTCTTGG | | | CACUAGUAUGU |
| | | | | | | CTTGATTCACTG | | | CUUGGCUUGAU |
| | | | | | | TGGCCGTGTAGT | | | UCACUGUGGCC |
| | | | | | | GCTACCCAGCGC | | | GUGUAGUGCUA |
| | | | | | | TGGCTGCCTCCT | | | CCCAGCGCUGG |
| | | | | | | CAGCATTG | | | CUGCCUCCUCA |
| | | | | | | [SEQ ID NO: 1757] | | | GCAUUG |
| | | | | | | | | | [SEQ ID NO: 1954] |
| 3302 | miR 155-M | -2.42428 | 0.285147 | TTGAACAA | CCCAAATC | CCTGGAGGCTTG | UUGAACAA | CCCAAAUC | CCUGGAGGCUU |
| | | | | GGGGCTGA | GCCCTTGTT | CTGAAGGCTGTA | GGGGCUGA | GCCCUUGU | GCUGAAGGCUG |
| | | | | TTTGGG | CAA | TGCTGTTGAACA | UUUGGG | UCAA | UAUGCUGUUGA |
| | | | | [SEQ ID | [SEQ ID | AGGGGCTGATTT | [SEQ ID | [SEQ ID | ACAAGGGGCUG |
| | | | | NO: 688] | NO: 1652] | GGGTTTTGGCCA | NO: 1216] | NO: 1847] | AUUUGGGUUUU |
| | | | | | | CTGACTGACCCA | | | GGCCACUGACU |
| | | | | | | AATCGCCCTTGT | | | GACCCAAAUCG |
| | | | | | | TCAACAGGACA | | | CCCUUGUUCAA |
| | | | | | | CAAGGCCTGTTA | | | CAGGACACAAG |
| | | | | | | CTAGCACTCACA | | | GCCUGUUACUA |
| | | | | | | TGGAACAAATG | | | GCACUCACAUG |
| | | | | | | GCCACCGG | | | GAACAAAUGGC |
| | | | | | | [SEQ ID NO: 1758] | | | CACCGG |
| | | | | | | | | | [SEQ ID NO: 1955] |
| 2586 | miR 155-M | -2.4228 | -0.13209 | TAGATTCAG | CCAAGTTCA | CCTGGAGGCTTG | UAGAUUCA | CCAAGUUC | CCUGGAGGCUU |
| | | | | AAGTAGAA | CTCTGAATC | CTGAAGGCTGTA | GAAGUAGA | ACUCUGAA | GCUGAAGGCUG |
| | | | | CTTGG | TA | TGCTGTAGATTC | ACUUGG | UCUA | UAUGCUGUAGA |
| | | | | [SEQ ID | [SEQ ID | AGAAGTAGAAC | [SEQ ID | [SEQ ID | UUCAGAAGUAG |
| | | | | NO: 1621] | NO: 1653] | TTGGTTTTGGCC | NO: 1816] | NO: 1848] | AACUUGGUUUU |
| | | | | | | ACTGACTGACCA | | | GGCCACUGACU |
| | | | | | | AGTTCACTCTGA | | | GACCAAGUUCA |
| | | | | | | ATCTACAGGAC | | | CUCUGAAUCUA |
| | | | | | | ACAAGGCCTGTT | | | CAGGACACAAG |
| | | | | | | ACTAGCACTCAC | | | GCCUGUUACUA |
| | | | | | | ATGGAACAAAT | | | GCACUCACAUG |
| | | | | | | GGCCACCGG | | | GAACAAAUGGC |
| | | | | | | [SEQ ID NO: 1759] | | | CACCGG |
| | | | | | | | | | [SEQ ID NO: 1956] |
| 1755 | miR-122 | -2.42198 | 0.034447 | TCGGGTTGA | CACACTTCA | GGCTACAGAGTT | UCGGGUUG | CACACUUC | GGCUACAGAGU |
| | | | | AATCTGAA | GACTTCAAC | TCCTTAGCAGAG | AAAUCUGA | AGACUUCA | UUCCUUAGCAG |
| | | | | GTGTG | CATA | CTGTCGGGTTGA | AGUGUG | ACCAUA | AGCUGUCGGGU |
| | | | | [SEQ ID | [SEQ ID | AATCTGAAGTGT | [SEQ ID | [SEQ ID | UGAAAUCUGAA |
| | | | | NO: 657] | NO: 1646] | GTGTCTAAACTA | NO: 1185] | NO: 1841] | GUGUGUGUCUA |
| | | | | | | TCACACTTCAGA | | | AACUAUCACAC |
| | | | | | | CTTCAACCATAT | | | UUCAGACUUCA |
| | | | | | | AGCTACTGCTAG | | | ACCAUAUAGCU |
| | | | | | | GCAATCCTTCCC | | | ACUGCUAGGCA |
| | | | | | | TCGATAAATGTC | | | AUCCUUCCCUC |
| | | | | | | TTGGCATCGTTT | | | GAUAAAUGUCU |
| | | | | | | GCTTTG | | | UGGCAUCGUUU |
| | | | | | | [SEQ ID NO: 1760] | | | GCUUUG |
| | | | | | | | | | [SEQ ID NO: 1957] |
| 2945 | miR-1-1 | -2.42094 | -0.06694 | TGTAGTAG | TGAGCCAA | CATGCAGACTGC | UGUAGUAG | UGAGCCAA | CAUGCAGACUG |
| | | | | AAGGCTTTG | AGCCTTCTA | CTGCTTGGGTGA | AAGGCUUU | AGCCUUCU | CCUGCUUGGGU |
| | | | | GCTGA | CCGACA | GCCAAAGCCTTC | GGCUGA | ACCGACA | GAGCCAAAGCC |
| | | | | [SEQ ID | [SEQ ID | TACCGACATATG | [SEQ ID | [SEQ ID | UUCUACCGACA |
| | | | | NO: 685] | NO: 1633] | GACCTGCTAAGC | NO: 1213] | NO: 1828] | UAUGGACCUGC |
| | | | | | | TATGTAGTAGAA | (Same guide as | | UAAGCUAUGUA |
| | | | | | | GGCTTTGGCTGA | XD-14860) | | GUAGAAGGCUU |
| | | | | | | CTCAGGCCGGG | | | UGGCUGACUCA |
| | | | | | | ACCTCTCTCGCC | | | GGCCGGGACCU |
| | | | | | | GCACTGAGGGG | | | CUCUCGCCGCA |
| | | | | | | CACTCCACACCA | | | CUGAGGGGCAC |
| | | | | | | CGGGGGCC | | | UCCACACCACG |
| | | | | | | [SEQ ID NO: 1761] | | | GGGGCC |
| | | | | | | | | | [SEQ ID NO: 1958 |
| 1755 | miR-132 | -2.41844 | 0.196175 | TCGGGTTGA | CCCACTTCA | GCCGTCCGCGCG | UCGGGUUG | CCCACUUC | GCCGUCCGCGC |
| | | | | AATCTGAA | GAGTGCAA | CCCCGCCCCCGC | AAAUCUGA | AGAGUGCA | GCCCCGCCCCC |
| | | | | GTGTG | CCCGA | GTCTCCAGGGCC | AGUGUG | ACCCGA | GCGUCUCCAGG |
| | | | | TSEQ ID | [SEQ ID | CACTTCAGAGTG | [SEQ ID | [SEQ ID | GCCCACUUCAG |
| | | | | NO: 657] | NO: 1672] | CAACCCGACTGT | NO: 1185] | NO: 1867] | AGUGCAACCCG |
| | | | | | | GGGAACTGGAG | | | ACUGUGGGAAC |
| | | | | | | GTCGGGTTGAA | | | UGGAGGUCGGG |
| | | | | | | ATCTGAAGTGTG | | | UUGAAAUCUGA |
| | | | | | | CCCCGCAGCAC | | | AGUGUGCCCCG |
| | | | | | | GCCCACGCGCC | | | CAGCACGCCCA |
| | | | | | | GCGCCACGCCG | | | CGCGCCGCGCC |
| | | | | | | CGCCCCGAGCC | | | ACGCCGCGCCC |
| | | | | | | [SEQ ID NO: 1762] | | | CGAGCC |
| | | | | | | | | | [SEQ ID NO: 1959] |
| 3301 | miR-1-1 | -2.41082 | 0.051034 | TGAACAAG | TGCCAAATC | CATGCAGACTGC | UGAACAAG | UGCCAAAU | CAUGCAGACUG |
| | | | | GGGCTGATT | AGCCCCTTG | CTGCTTGGGTGC | GGGCUGAU | CAGCCCCU | CCUGCUUGGGU |
| | | | | TGGGA | CGTCA | CAAATCAGCCCC | UUGGGA | UGCGUCA | GCCAAAUCAGC |
| | | | | [SEQ ID | [SEQ ID | TTGCGTCATATG | [SEQ ID | [SEQ ID | CCCUUGCGUCA |
| | | | | NO: 687] | NO: 1673] | GACCTGCTAAGC | NO: 1215] | NO: 1868] | UAUGGACCUGC |
| | | | | | | TATGAACAAGG | | | UAAGCUAUGAA |
| | | | | | | GGCTGATTTGGG | | | CAAGGGGCUGA |
| | | | | | | ACTCAGGCCGG | | | UUUGGGACUCA |
| | | | | | | GACCTCTCTCGC | | | GGCCGGGACCU |
| | | | | | | CGCACTGAGGG | | | CUCUCGCCGCA |
| | | | | | | GCACTCCACACC | | | CUGAGGGGCAC |
| | | | | | | ACGGGGGCC | | | UCCACACCACG |
| | | | | | | [SEQ ID NO: 1763] | | | GGGGCC |
| | | | | | | | | | [SEQ ID NO: 1960] |
| 2602 | miR-132 | -2.40987 | -0.18915 | TTTAGTAGT | ACTCTATGG | GCCGTCCGCGCG | UUUAGUAG | ACUCUAUG | GCCGUCCGCGC |
| | | | | TGATCCATA | ATAACCTAC | CCCCGCCCCCGC | UUGAUCCA | GAUAACCU | GCCCCGCCCCC |
| | | | | GATT | TAAA | GTCTCCAGGGAC | UAGAUU | ACUAAA | GCGUCUCCAGG |
| | | | | SEQ ID | SEQ ID | TCTATGGATAAC | ISEQ ID | [SEQ ID | GACUCUAUGGA |
| | | | | NO: 1616] | NO: 1674] | CTACTAAACTGT | NO: 202] | NO: 1869] | UAACCUACUAA |
| | | | | | | GGGAACTGGAG | (Same guide as | | ACUGUGGGAAC |
| | | | | | | GTTTAGTAGTTG | XD-14837) | | UGGAGGUUUAG |
| | | | | | | ATCCATAGATTC | | | UAGUUGAUCCA |
| | | | | | | CCCGCAGCACG | | | UAGAUUCCCCG |
| | | | | | | CCCACGCGCCGC | | | CAGCACGCCCA |
| | | | | | | GCCACGCCGCG | | | CGCGCCGCGCC |
| | | | | | | CCCCGAGCC | | | ACGCCGCGCCC |
| | | | | | | [SEQ ID NO: 1764] | | | CGAGCC |
| | | | | | | | | | [SEQ ID NO: 1961] |
| 3302 | miR-122 M | -2.40308 | -0.14782 | TTGAACAA | CCCAAATC | GGCTACAGAGTT | UUGAACAA | CCCAAAUC | GGCUACAGAGU |
| | | | | GGGGCTGA | AGCACCTTG | TGCTTAGCAGAG | GGGGCUGA | AGCACCUU | UUGCUUAGCAG |
| | | | | TTTGGG | TTACA | CTGTTGAACAAG | UUUGGG | GUUACA | AGCUGUUGAAC |
| | | | | SEQ ID | [SEQ ID | GGGCTGATTTGG | [SEQ ID | SEQ ID | AAGGGGCUGAU |
| | | | | NO: 688] | NO: 1675] | GTGTCTAAACTA | NO: 1216] | NO: 1870] | UUGGGUGUCUA |
| | | | | | | TCCCAAATCAGC | | | AACUAUCCCAA |
| | | | | | | ACCTTGTTACAT | | | AUCAGCACCUU |
| | | | | | | AGCTACTGCTAG | | | GUUACAUAGCU |
| | | | | | | GCCATCCTTCCC | | | ACUGCUAGGCC |
| | | | | | | TCGATAAATGTC | | | AUCCUUCCCUC |
| | | | | | | TTGGCATCGTTT | | | GAUAAAUGUCU |
| | | | | | | GCTTTG | | | UGGCAUCGUUU |
| | | | | | | [SEQ ID NO: 1765] | | | GCUUUG |
| | | | | | | | | | [SEQ ID NO: 1962] |
| 1755 | miR-155E | -2.39604 | -0.03915 | TCGGGTTGA | CACACTTCG | CTGGAGGCTTGC | UCGGGUUG | CACACUUC | CUGGAGGCUUG |
| | | | | AATCTGAA | ATTCAACCC | TTTGGGCTGTAT | AAAUCUGA | GAUUCAAC | CUUUGGGCUGU |
| | | | | GTGTG | GA | GCTGTCGGGTTG | AGUGUG | CCGA | AUGCUGUCGGG |
| | | | | [SEQ ID | [SEQ ID | AAATCTGAAGT | [SEQ ID | [SEQ ID | UUGAAAUCUGA |
| | | | | NO: 657] | NO: 1676] | GTGTTTTGGCCT | NO: 1185] | NO: 1871] | AGUGUGUUUUG |
| | | | | | | CTGACTGACACA | | | GCCUCUGACUG |
| | | | | | | CTTCGATTCAAC | | | ACACACUUCGA |
| | | | | | | CCGACAGGACA | | | UUCAACCCGAC |
| | | | | | | AGGCCCTTTATC | | | AGGACAAGGCC |
| | | | | | | AGCACTCACATG | | | CUUUAUCAGCA |
| | | | | | | GAACAAATGGC | | | CUCACAUGGAA |
| | | | | | | CACCGTGGG | | | CAAAUGGCCAC |
| | | | | | | [SEQ ID NO: 1766] | | | CGUGGG |
| | | | | | | | | | [SEQ ID NO: 1963] |
| 3842 | miR-130a | -2.39495 | -0.55009 | AACGTGAG | TTCGATCCA | GCAGGGCCGGC | AACGUGAG | UUCGAUCC | GCAGGGCCGGC |
| | | | | AAGGATGG | TACTTCTCA | ATGCCTCTGCTG | AAGGAUGG | AUACUUCU | AUGCCUCUGCU |
| | | | | ATCGTA | TGTC | CTGGCCATTCGA | AUCGUA | CAUGUC | GCUGGCCAUUC |
| | | | | [SEQ ID | [SEQ ID | TCCATACTTCTC | [SEQ ID | [SEQ ID | GAUCCAUACUU |
| | | | | NO: 1625] | NO: 1677] | ATGTCCTGTCTG | NO: 1824] | NO: 1872] | CUCAUGUCCUG |
| | | | | | | CACCTGTCACTA | | | UCUGCACCUGU |
| | | | | | | GAACGTGAGAA | | | CACUAGAACGU |
| | | | | | | GGATGGATCGT | | | GAGAAGGAUGG |
| | | | | | | ATGGCCGTGTAG | | | AUCGUAUGGCC |
| | | | | | | TGCTACCCAGCG | | | GUGUAGUGCUA |
| | | | | | | CTGGCTGCCTCC | | | CCCAGCGCUGG |
| | | | | | | TCAGCATTG | | | CUGCCUCCUCA |
| | | | | | | [SEQ ID NO: 1767] | | | GCAUUG |
| | | | | | | | | | [SEQ ID NO: 1964 |
| 2945 | miR-100 | -2.38747 | -0.10088 | TGTAGTAG | TCAGCCCA | CCCAAAAGAGA | UGUAGUAG | UCAGCCCA | CCCAAAAGAGA |
| | | | | AAGGCTTTG | AGACTTCTA | GAAGATATTGA | AAGGCUUU | AGACUUCU | GAAGAUAUUGA |
| | | | | GCTGA | ATACT | GGCCTGTTGCCA | GGCUGA | AAUACU | GGCCUGUUGCC |
| | | | | SEQ ID | [SEQ ID | CATGTAGTAGA | [SEQ ID | [SEQ ID | ACAUGUAGUAG |
| | | | | NO: 685] | NO: 1678] | AGGCTTTGGCTG | NO: 1213] | NO: 1873] | AAGGCUUUGGC |
| | | | | | | AGTATTAGTCCG | (Same guide as | | UGAGUAUUAGU |
| | | | | | | TCAGCCCAAGA | XD-14860) | | CCGUCAGCCCA |
| | | | | | | CTTCTAATACTT | | | AGACUUCUAAU |
| | | | | | | GTGTCTGTTAGG | | | ACUUGUGUCUG |
| | | | | | | CAATCTCACGGA | | | UUAGGCAAUCU |
| | | | | | | CCTGGGGCTTTG | | | CACGGACCUGG |
| | | | | | | CTTATATGCC | | | GGCUUUGCUUA |
| | | | | | | [SEQ ID NO: 1768] | | | UAUGCC |
| | | | | | | | | | [SEQ ID NO: 1965] |
| 2586 | miR-130a | -2.38521 | 0.042149 | TAGATTCAG | CGAAGTTCT | GCAGGGCCGGC | UAGAUUCA | CGAAGUUC | GCAGGGCCGGC |
| | | | | AAGTAGAA | AATTCTGAA | ATGCCTCTGCTG | GAAGUAGA | UAAUUCUG | AUGCCUCUGCU |
| | | | | CTTGG | TCTC | CTGGCCACGAA | ACUUGG | AAUCUC | GCUGGCCACGA |
| | | | | [SEQ ID | [SEQ ID | GTTCTAATTCTG | [SEQ ID | [SEQ ID | AGUUCUAAUUC |
| | | | | NO: 1621] | NO: 1679] | AATCTCCTGTCT | NO: 1816] | NO: 1874] | UGAAUCUCCUG |
| | | | | | | GCACCTGTCACT | | | UCUGCACCUGU |
| | | | | | | AGTAGATTCAG | | | CACUAGUAGAU |
| | | | | | | AAGTAGAACTT | | | UCAGAAGUAGA |
| | | | | | | GGTGGCCGTGTA | | | ACUUGGUGGCC |
| | | | | | | GTGCTACCCAGC | | | GUGUAGUGCUA |
| | | | | | | GCTGGCTGCCTC | | | CCCAGCGCUGG |
| | | | | | | CTCAGCATTG | | | CUGCCUCCUCA |
| | | | | | | [SEQ ID NO: 1769] | | | GCAUUG |
| | | | | | | | | | [SEQ ID NO: 1966] |
| 3301 | miR-1-1_M | -2.38494 | 0.327128 | TGAACAAG | TGCCAAATC | CATGCAGACTGC | UGAACAAG | UGCCAAAU | CAUGCAGACUG |
| | | | | GGGCTGATT | AGCCCCTTG | CTGCTTGGGTGC | GGGCUGAU | CAGCCCCU | CCUGCUUGGGU |
| | | | | TGGGA | CGTCA | CAAATCAGCCCC | UUGGGA | UGCGUCA | GCCAAAUCAGC |
| | | | | [SEQ ID | [SEQ ID | TTGCGTCATATG | [SEQ ID | [SEQ ID | CCCUUGCGUCA |
| | | | | NO: 687] | NO: 1673] | GACCTGCTAAGC | NO: 1215] | NO: 1868] | UAUGGACCUGC |
| | | | | | | TATGAACAAGG | | | UAAGCUAUGAA |
| | | | | | | GGCTGATTTGGG | | | CAAGGGGCUGA |
| | | | | | | ACTCAGGCCGG | | | UUUGGGACUCA |
| | | | | | | GACCTCTTCCGC | | | GGCCGGGACCU |
| | | | | | | CGCACTGAGGG | | | CUUCCGCCGCA |
| | | | | | | GCACTCCACACC | | | CUGAGGGGCAC |
| | | | | | | ACGGGGGCC | | | UCCACACCACG |
| | | | | | | [SEQ ID NO: 1770] | | | GGGGCC |
| | | | | | | | | | [SEQ ID NO: 1967] |
| 1755 | miR-190a | -2.38113 | 0.329455 | TCGGGTTGA | CACTTCAGA | GAGCTCAGTCA | UCGGGUUG | CACUUCAG | GAGCUCAGUCA |
| | | | | AATCTGAA | TTTCAACCC | AACCTGGATGCC | AAAUCUGA | AUUUCAAC | AACCUGGAUGC |
| | | | | GTGTG | AC | TTTTCTGCAGGC | AGUGUG | CCAC | CUUUUCUGCAG |
| | | | | [SEQ ID | [SEQ ID | CTCTGTGTCGGG | [SEQ ID | [SEQ ID | GCCUCUGUGUC |
| | | | | NO: 657] | NO: 1680] | TTGAAATCTGAA | NO: 1185] | NO: 1875] | GGGUUGAAAUC |
| | | | | | | GTGTGTGTTATT | | | UGAAGUGUGUG |
| | | | | | | TAATCCACACTT | | | UUAUUUAAUCC |
| | | | | | | CAGATTTCAACC | | | ACACUUCAGAU |
| | | | | | | CACCTACAGTGT | | | UUCAACCCACC |
| | | | | | | CTTGCCCTGTCT | | | UACAGUGUCUU |
| | | | | | | CCGGGGGTTCCT | | | GCCCUGUCUCC |
| | | | | | | AATAAAG | | | GGGGGUUCCUA |
| | | | | | | [SEQ ID NO: 1771] | | | AUAAAG |
| | | | | | | | | | [SEQ ID NO: 1968] |
| 2602 | miR-1-1_M | -2.37919 | 0.040602 | TTTAGTAGT | ATTCTATGG | CATGCAGACTGC | UUUAGUAG | AUUCUAUG | CAUGCAGACUG |
| | | | | TGATCCATA | ATCAACTAC | CTGCTTGGGATT | UUGAUCCA | GAUCAACU | CCUGCUUGGGA |
| | | | | GATT | CGAAA | CTATGGATCAAC | UAGAUU | ACCGAAA | UUCUAUGGAUC |
| | | | | [SEQ ID | [SEQ ID | TACCGAAATATG | [SEQ ID | [SEQ ID | AACUACCGAAA |
| | | | | NO: 1616] | NO: 1681] | GACCTGCTAAGC | NO: 202] | NO: 1876] | UAUGGACCUGC |
| | | | | | | TATTTAGTAGTT | (Same guide as | | UAAGCUAUUUA |
| | | | | | | GATCCATAGATT | XD-14837) | | GUAGUUGAUCC |
| | | | | | | CTCAGGCCGGG | | | AUAGAUUCUCA |
| | | | | | | ACCTCTTCCGCC | | | GGCCGGGACCU |
| | | | | | | GCACTGAGGGG | | | CUUCCGCCGCA |
| | | | | | | CACTCCACACCA | | | CUGAGGGGCAC |
| | | | | | | CGGGGGCC | | | UCCACACCACG |
| | | | | | | [SEQ ID NO: 1772] | | | GGGGCC |
| | | | | | | | | | [SEQ ID NO: 1969] |
| 1231 | miR-100_M | -2.37228 | -0.26919 | TTCACTTTA | CTGCTACCA | CCCAAAAGAGA | UUCACUUU | CUGCUACC | CCCAAAAGAGA |
| | | | | GCACTGAT | GGGCTAAA | GAAGATATTGAT | AGCACUGA | AGGGCUAA | GAAGAUAUUGA |
| | | | | AGCAG | ATGAT | GCCTGTTGCCAC | UAGCAG | AAUGAU | UGCCUGUUGCC |
| | | | | [SEQ ID | [SEQ ID | ATTCACTTTAGC | [SEQ ID | [SEQ ID | ACAUUCACUUU |
| | | | | NO: 1627] | NO: 1682] | ACTGATAGCAG | NO: 1825] | NO: 1877] | AGCACUGAUAG |
| | | | | | | GTATTAGTCCGC | | | CAGGUAUUAGU |
| | | | | | | TGCTACCAGGGC | | | CCGCUGCUACC |
| | | | | | | TAAAATGATTGT | | | AGGGCUAAAAU |
| | | | | | | GTCTGTTAGGCT | | | GAUUGUGUCUG |
| | | | | | | ATTCCACGGACC | | | UUAGGCUAUUC |
| | | | | | | TGGGGCTTTGCT | | | CACGGACCUGG |
| | | | | | | TATATGCC | | | GGCUUUGCUUA |
| | | | | | | [SEQ ID NO: 1773] | | | UAUGCC |
| | | | | | | | | | [SEQ ID NO: 1970] |
| 3273 | miR-155E | -2.36984 | -0.0801 | TAGGACTGT | CAATATGTG | CTGGAGGCTTGC | UAGGACUG | CAAUAUGU | CUGGAGGCUUG |
| | | | | AGGCAACA | CCACAGTCC | TTTGGGCTGTAT | UAGGCAAC | GCCACAGU | CUUUGGGCUGU |
| | | | | TATTG | TA | GCTGTAGGACTG | AUAUUG | CCUA | AUGCUGUAGGA |
| | | | | [SEQ ID | [SEQ ID | TAGGCAACATAT | [SEQ ID | [SEQ ID | CUGUAGGCAAC |
| | | | | NO: 1628] | NO: 1683] | TGTTTTGGCCTC | NO: 1821] | NO: 1878] | AUAUUGUUUUG |
| | | | | | | TGACTGACAATA | | | GCCUCUGACUG |
| | | | | | | TGTGCCACAGTC | | | ACAAUAUGUGC |
| | | | | | | CTACAGGACAA | | | CACAGUCCUAC |
| | | | | | | GGCCCTTTATCA | | | AGGACAAGGCC |
| | | | | | | GCACTCACATGG | | | CUUUAUCAGCA |
| | | | | | | AACAAATGGCC | | | CUCACAUGGAA |
| | | | | | | ACCGTGGG | | | CAAAUGGCCAC |
| | | | | | | [SEQ ID NO: 1774] | | | CGUGGG |
| | | | | | | | | | [SEQ ID NO: 1971] |
| 3301 | miR-190a | -2.36785 | 0.195332 | TGAACAAG | TCCAATCAG | GAGCTCAGTCA | UGAACAAG | UCCAAUCA | GAGCUCAGUCA |
| | | | | GGGCTGATT | CCCCTTGTT | AACCTGGATGCC | GGGCUGAU | GCCCCUUG | AACCUGGAUGC |
| | | | | TGGGA | AC | TTTTCTGCAGGC | UUGGGA | UUAC | CUUUUCUGCAG |
| | | | | [SEQ ID | [SEQ ID | CTCTGTGTGAAC | [SEQ ID | [SEQ ID | GCCUCUGUGUG |
| | | | | NO: 687] | NO: 1684] | AAGGGGCTGAT | NO: 1215] | NO: 1879] | AACAAGGGGCU |
| | | | | | | TTGGGATGTTAT | | | GAUUUGGGAUG |
| | | | | | | TTAATCCATCCA | | | UUAUUUAAUCC |
| | | | | | | ATCAGCCCCTTG | | | AUCCAAUCAGC |
| | | | | | | TTACCTACAGTG | | | CCCUUGUUACC |
| | | | | | | TCTTGCCCTGTC | | | UACAGUGUCUU |
| | | | | | | TCCGGGGGTTCC | | | GCCCUGUCUCC |
| | | | | | | TAATAAAG | | | GGGGGUUCCUA |
| | | | | | | [SEQ ID NO: 1775] | | | AUAAAG |
| | | | | | | | | | [SEQ ID NO: 1972] |
| 3043 | miR-100_M | -2.35911 | 0.045827 | TTTGGTGCA | AGCCTGCTT | CCCAAAAGAGA | UUUGGUGC | AGCCUGCU | CCCAAAAGAGA |
| | | | | AAACAAAC | GGTTTGCAA | GAAGATATTGAT | AAAACAAA | UGGUUUGC | GAAGAUAUUGA |
| | | | | AGGCT | CAAT | GCCTGTTGCCAC | CAGGCU | AACAAU | UGCCUGUUGCC |
| | | | | [SEQ ID | [SEQ ID | ATTTGGTGCAAA | [SEQ ID | [SEQ ID | ACAUUUGGUGC |
| | | | | NO: 1615] | NO: 1639] | ACAAACAGGCT | NO: 1812] | NO: 1834] | AAAACAAACAG |
| | | | | | | GTATTAGTCCGA | | | GCUGUAUUAGU |
| | | | | | | GCCTGCTTGGTT | | | CCGAGCCUGCU |
| | | | | | | TGCAACAATTGT | | | UGGUUUGCAAC |
| | | | | | | GTCTGTTAGGCT | | | AAUUGUGUCUG |
| | | | | | | ATTCCACGGACC | | | UUAGGCUAUUC |
| | | | | | | TGGGGCTTTGCT | | | CACGGACCUGG |
| | | | | | | TATATGCC | | | GGCUUUGCUUA |
| | | | | | | [SEQ ID NO: 1776] | | | UAUGCC |
| | | | | | | | | | [SEQ ID NO: 1973] |
| 2586 | miR-122 | -2.35707 | 0.153236 | TAGATTCAG | CCAAGTTCT | GGCTACAGAGTT | UAGAUUCA | CCAAGUUC | GGCUACAGAGU |
| | | | | AAGTAGAA | ACCTCTGAA | TCCTTAGCAGAG | GAAGUAGA | UACCUCUG | UUCCUUAGCAG |
| | | | | CTTGG | TAGA | CTGTAGATTCAG | ACUUGG | AAUAGA | AGCUGUAGAUU |
| | | | | [SEQ ID | [SEQ ID | AAGTAGAACTT | [SEQ ID | [SEQ ID | CAGAAGUAGAA |
| | | | | NO: 1621] | NO: 1685] | GGTGTCTAAACT | NO: 1816] | NO: 1880] | CUUGGUGUCUA |
| | | | | | | ATCCAAGTTCTA | | | AACUAUCCAAG |
| | | | | | | CCTCTGAATAGA | | | UUCUACCUCUG |
| | | | | | | TAGCTACTGCTA | | | AAUAGAUAGCU |
| | | | | | | GGCAATCCTTCC | | | ACUGCUAGGCA |
| | | | | | | CTCGATAAATGT | | | AUCCUUCCCUC |
| | | | | | | CTTGGCATCGTT | | | GAUAAAUGUCU |
| | | | | | | TGCTTTG | | | UGGCAUCGUUU |
| | | | | | | [SEQ ID NO: 1777] | | | GCUUUG |
| | | | | | | | | | [SEQ ID NO: 1974] |
| 1755 | miR- | -2.34216 | 0.272299 | TCGGGTTGA | CACTTCAGA | GAGCTCAGTCA | UCGGGUUG | CACUUCAG | GAGCUCAGUCA |
| | 190a_M | | | AATCTGAA | TTTCAACCC | AACCTGGATGCC | AAAUCUGA | AUUUCAAC | AACCUGGAUGC |
| | | | | GTGTG | AC | TTTTCTGCAGGC | AGUGUG | CCAC | CUUUUCUGCAG |
| | | | | [SEQ ID | [SEQ ID | GTCTGTGTCGGG | [SEQ ID | [SEQ ID | GCGUCUGUGUC |
| | | | | NO: 657] | NO: 1680] | TTGAAATCTGAA | NO: 1185] | NO: 1875] | GGGUUGAAAUC |
| | | | | | | GTGTGTGTTATT | | | UGAAGUGUGUG |
| | | | | | | TAATCCACACTT | | | UUAUUUAAUCC |
| | | | | | | CAGATTTCAACC | | | ACACUUCAGAU |
| | | | | | | CACCTACAGTCT | | | UUCAACCCACC |
| | | | | | | CTTGCCCTGTCT | | | UACAGUCUCUU |
| | | | | | | CCGGGGGTTCCT | | | GCCCUGUCUCC |
| | | | | | | AATAAAG | | | GGGGGUUCCUA |
| | | | | | | [SEQ ID NO: 1778] | | | AUAAAG |
| | | | | | | | | | [SEQ ID NO: 1975] |
| 1784 | miR-132 | -2.34143 | -0.26117 | ATTAACTAC | TCCAGACC | GCCGTCCGCGCG | AUUAACUA | UCCAGACC | GCCGUCCGCGC |
| | | | | TCTTTGGTC | AAATATTA | CCCCGCCCCCGC | CUCUUUGG | AAAUAUUA | GCCCCGCCCCC |
| | | | | TGAA | GTTAAT | GTCTCCAGGGTC | UCUGAA | GUUAAU | GCGUCUCCAGG |
| | | | | [SEQ ID | [SEQ ID | CAGACCAAATA | [SEQ ID | [SEQ ID | GUCCAGACCAA |
| | | | | NO: 608] | NO: 1686] | TTAGTTAATCTG | NO: 112] | NO: 1881] | AUAUUAGUUAA |
| | | | | | | TGGGAACTGGA | (Same guide as | | UCUGUGGGAAC |
| | | | | | | GGATTAACTACT | XD-14792) | | UGGAGGAUUAA |
| | | | | | | CTTTGGTCTGAA | | | CUACUCUUUGG |
| | | | | | | CCCCGCAGCAC | | | UCUGAACCCCG |
| | | | | | | GCCCACGCGCC | | | CAGCACGCCCA |
| | | | | | | GCGCCACGCCG | | | CGCGCCGCGCC |
| | | | | | | CGCCCCGAGCC | | | ACGCCGCGCCC |
| | | | | | | [SEQ ID NO: 1779] | | | CGAGCC |
| | | | | | | | | | [SEQ ID NO: 1976] |
| 3272 | miR-155E | -2.34055 | -0.19485 | AGGACTGT | GCAATATGT | CTGGAGGCTTGC | AGGACUGU | GCAAUAUG | CUGGAGGCUUG |
| | | | | AGGCAACA | GCTACAGTC | TTTGGGCTGTAT | AGGCAACA | UGCUACAG | CUUUGGGCUGU |
| | | | | TATTGC | CT | GCTGAGGACTGT | UAUUGC | UCCU | AUGCUGAGGAC |
| | | | | [SEQ ID | [SEQ ID | AGGCAACATATT | [SEQ ID | [SEQ ID | UGUAGGCAACA |
| | | | | NO: 1618] | NO: 1687] | GCTTTTGGCCTC | NO: 1814] | NO: 1882] | UAUUGCUUUUG |
| | | | | | | TGACTGAGCAAT | | | GCCUCUGACUG |
| | | | | | | ATGTGCTACAGT | | | AGCAAUAUGUG |
| | | | | | | CCTCAGGACAA | | | CUACAGUCCUC |
| | | | | | | GGCCCTTTATCA | | | AGGACAAGGCC |
| | | | | | | GCACTCACATGG | | | CUUUAUCAGCA |
| | | | | | | AACAAATGGCC | | | CUCACAUGGAA |
| | | | | | | ACCGTGGG | | | CAAAUGGCCAC |
| | | | | | | [SEQ ID NO: 1780] | | | CGUGGG |
| | | | | | | | | | [SEQ ID NO: 1977] |
| 1159 | miR-1-1_M | -2.33035 | 0.359288 | TGTACCACA | GATCAGAC | CATGCAGACTGC | UGUACCAC | GAUCAGAC | CAUGCAGACUG |
| | | | | ACAAAGTC | TTTGTTGTG | CTGCTTGGGGAT | AACAAAGU | UUUGUUGU | CCUGCUUGGGG |
| | | | | TGAAC | GCGACA | CAGACTTTGTTG | CUGAAC | GGCGACA | AUCAGACUUUG |
| | | | | [SEQ ID | [SEQ ID | TGGCGACATATG | [SEQ ID | [SEQ ID | UUGUGGCGACA |
| | | | | NO: 603] | NO: 1688] | GACCTGCTAAGC | NO: 40] | NO: 1883] | UAUGGACCUGC |
| | | | | | | TATGTACCACAA | (Same guide as | | UAAGCUAUGUA |
| | | | | | | CAAAGTCTGAA | XD-14756) | | CCACAACAAAG |
| | | | | | | CCTCAGGCCGG | | | UCUGAACCUCA |
| | | | | | | GACCTCTTCCGC | | | GGCCGGGACCU |
| | | | | | | CGCACTGAGGG | | | CUUCCGCCGCA |
| | | | | | | GCACTCCACACC | | | CUGAGGGGCAC |
| | | | | | | ACGGGGGCC | | | UCCACACCACG |
| | | | | | | [SEQ ID NO: 1781] | | | GGGGCC |
| | | | | | | | | | [SEQ ID NO: 1978] |
| 3269 | miR- | -2.3297 | 0.037293 | ACTGTAGG | CACAATAT | GAGCTCAGTCA | ACUGUAGG | CACAAUAU | GAGCUCAGUCA |
| | 190a_M | | | CAACATATT | GTTGCCTAC | AACCTGGATGCC | CAACAUAU | GUUGCCUA | AACCUGGAUGC |
| | | | | GCGTG | AAG | TTTTCTGCAGGC | UGCGUG | CAAG | CUUUUCUGCAG |
| | | | | SEQ ID | [SEQ ID | GTCTGTGACTGT | [SEQ ID | [SEQ ID | GCGUCUGUGAC |
| | | | | NO: 1629] | NO: 1689] | AGGCAACATATT | NO: 1822] | NO: 1884] | UGUAGGCAACA |
| | | | | | | GCGTGTGTTATT | | | UAUUGCGUGUG |
| | | | | | | TAATCCACACAA | | | UUAUUUAAUCC |
| | | | | | | TATGTTGCCTAC | | | ACACAAUAUGU |
| | | | | | | AAGCTACAGTCT | | | UGCCUACAAGC |
| | | | | | | CTTGCCCTGTCT | | | UACAGUCUCUU |
| | | | | | | CCGGGGGTTCCT | | | GCCCUGUCUCC |
| | | | | | | AATAAAG | | | GGGGGUUCCUA |
| | | | | | | [SEQ ID NO: 1782] | | | AUAAAG |
| | | | | | | | | | [SEQ ID NO: 1979] |
| 3043 | miR-1-1 | -2.32683 | 0.097086 | TTTGGTGCA | ACCCTGTTT | CATGCAGACTGC | UUUGGUGC | ACCCUGUU | CAUGCAGACUG |
| | | | | AAACAAAC | GTTTTGCAC | CTGCTTGGGACC | AAAACAAA | UGUUUUGC | CCUGCUUGGGA |
| | | | | AGGCT | GAAAA | CTGTTTGTTTTG | CAGGCU | ACGAAAA | CCCUGUUUGUU |
| | | | | [SEQ ID | [SEQ ID | CACGAAAATAT | [SEQ ID | [SEQ ID | UUGCACGAAAA |
| | | | | NO: 1615] | NO: 1690] | GGACCTGCTAA | NO: 1812] | NO: 1885] | UAUGGACCUGC |
| | | | | | | GCTATTTGGTGC | | | UAAGCUAUUUG |
| | | | | | | AAAACAAACAG | | | GUGCAAAACAA |
| | | | | | | GCTCTCAGGCCG | | | ACAGGCUCUCA |
| | | | | | | GGACCTCTCTCG | | | GGCCGGGACCU |
| | | | | | | CCGCACTGAGG | | | CUCUCGCCGCA |
| | | | | | | GGCACTCCACAC | | | CUGAGGGGCAC |
| | | | | | | CACGGGGGCC | | | UCCACACCACG |
| | | | | | | [SEQ ID NO: 1783] | | | GGGGCC |
| | | | | | | | | | [SEQ ID NO: 1980] |
| 3273 | miR-1-1 | -2.32464 | -0.13929 | TAGGACTGT | CTATATGTT | CATGCAGACTGC | UAGGACUG | CUAUAUGU | CAUGCAGACUG |
| | | | | AGGCAACA | GCCTACAGT | CTGCTTGGGCTA | UAGGCAAC | UGCCUACA | CCUGCUUGGGC |
| | | | | TATTG | GACTA | TATGTTGCCTAC | AUAUUG | GUGACUA | UAUAUGUUGCC |
| | | | | [SEQ ID | [SEQ ID | AGTGACTATATG | [SEQ ID | [SEQ ID | UACAGUGACUA |
| | | | | NO: 1628] | NO: 1691] | GACCTGCTAAGC | NO: 1821] | NO: 1886] | UAUGGACCUGC |
| | | | | | | TATAGGACTGTA | | | UAAGCUAUAGG |
| | | | | | | GGCAACATATTG | | | ACUGUAGGCAA |
| | | | | | | CTCAGGCCGGG | | | CAUAUUGCUCA |
| | | | | | | ACCTCTCTCGCC | | | GGCCGGGACCU |
| | | | | | | GCACTGAGGGG | | | CUCUCGCCGCA |
| | | | | | | CACTCCACACCA | | | CUGAGGGGCAC |
| | | | | | | CGGGGGCC | | | UCCACACCACG |
| | | | | | | [SEQ ID NO: 1784] | | | GGGGCC |
| | | | | | | | | | [SEQ ID NO: 1981] |
| 2586 | miR-100 | -2.32164 | -0.18294 | TAGATTCAG | CCAAGTCCT | CCCAAAAGAGA | UAGAUUCA | CCAAGUCC | CCCAAAAGAGA |
| | | | | AAGTAGAA | AATTCTGAC | GAAGATATTGA | GAAGUAGA | UAAUUCUG | GAAGAUAUUGA |
| | | | | CTTGG | TCTT | GGCCTGTTGCCA | ACUUGG | ACUCUU | GGCCUGUUGCC |
| | | | | [SEQ ID | [SEQ ID | CATAGATTCAGA | [SEQ ID | [SEQ ID | ACAUAGAUUCA |
| | | | | NO: 1621] | NO: 1692] | AGTAGAACTTG | NO: 1816] | NO: 1887] | GAAGUAGAACU |
| | | | | | | GGTATTAGTCCG | | | UGGGUAUUAGU |
| | | | | | | CCAAGTCCTAAT | | | CCGCCAAGUCC |
| | | | | | | TCTGACTCTTTG | | | UAAUUCUGACU |
| | | | | | | TGTCTGTTAGGC | | | CUUUGUGUCUG |
| | | | | | | AATCTCACGGAC | | | UUAGGCAAUCU |
| | | | | | | CTGGGGCTTTGC | | | CACGGACCUGG |
| | | | | | | TTATATGCC | | | GGCUUUGCUUA |
| | | | | | | [SEQ ID NO: 1785] | | | UAUGCC |
| | | | | | | | | | [SEQ ID NO: 1982] |
| 2585 | miR-1-1_M | -2.31178 | 0.12336 | AGATTCAG | GGCAAGTT | CATGCAGACTGC | AGAUUCAG | GGCAAGUU | CAUGCAGACUG |
| | | | | AAGTAGAA | CTACTTCTG | CTGCTTGGGGGC | AAGUAGAA | CUACUUCU | CCUGCUUGGGG |
| | | | | CTTGGC | ACCTCT | AAGTTCTACTTC | CUUGGC | GACCUCU | GCAAGUUCUAC |
| | | | | [SEQ ID | [SEQ ID | TGACCTCTTATG | [SEQ ID | [SEQ ID | UUCUGACCUCU |
| | | | | NO: 1630] | NO: 1693] | GACCTGCTAAGC | NO: 1823] | NO: 1888] | UAUGGACCUGC |
| | | | | | | TAAGATTCAGA | | | UAAGCUAAGAU |
| | | | | | | AGTAGAACTTG | | | UCAGAAGUAGA |
| | | | | | | GCCTCAGGCCG | | | ACUUGGCCUCA |
| | | | | | | GGACCTCTTCCG | | | GGCCGGGACCU |
| | | | | | | CCGCACTGAGG | | | CUUCCGCCGCA |
| | | | | | | GGCACTCCACAC | | | CUGAGGGGCAC |
| | | | | | | CACGGGGGCC | | | UCCACACCACG |
| | | | | | | [SEQ ID NO: 1786] | | | GGGGCC |
| | | | | | | | | | [SEQ ID NO: 1983] |
| 3273 | miR-122 | -2.30907 | -0.11515 | TAGGACTGT | CAATATGTT | GGCTACAGAGTT | UAGGACUG | CAAUAUGU | GGCUACAGAGU |
| | | | | AGGCAACA | GCATACAG | TCCTTAGCAGAG | UAGGCAAC | UGCAUACA | UUCCUUAGCAG |
| | | | | TATTG | TCAGA | CTGTAGGACTGT | AUAUUG | GUCAGA | AGCUGUAGGAC |
| | | | | [SEQ ID | [SEQ ID | AGGCAACATATT | [SEQ ID | [SEQ ID | UGUAGGCAACA |
| | | | | NO: 1628] | NO: 1694] | GTGTCTAAACTA | NO: 1821] | NO: 1889] | UAUUGUGUCUA |
| | | | | | | TCAATATGTTGC | | | AACUAUCAAUA |
| | | | | | | ATACAGTCAGAT | | | UGUUGCAUACA |
| | | | | | | AGCTACTGCTAG | | | GUCAGAUAGCU |
| | | | | | | GCAATCCTTCCC | | | ACUGCUAGGCA |
| | | | | | | TCGATAAATGTC | | | AUCCUUCCCUC |
| | | | | | | TTGGCATCGTTT | | | GAUAAAUGUCU |
| | | | | | | GCTTTG | | | UGGCAUCGUUU |
| | | | | | | [SEQ ID NO: 1787] | | | GCUUUG |
| | | | | | | | | | [SEQ ID NO: 1984] |
| 3301 | miR-100_M | -2.30882 | -0.2279 | TGAACAAG | TCCCAACTC | CCCAAAAGAGA | UGAACAAG | UCCCAACU | CCCAAAAGAGA |
| | | | | GGGCTGATT | ATCCCCTTA | GAAGATATTGAT | GGGCUGAU | CAUCCCCU | GAAGAUAUUGA |
| | | | | TGGGA | TTCT | GCCTGTTGCCAC | UUGGGA | UAUUCU | UGCCUGUUGCC |
| | | | | [SEQ ID | [SEQ ID | ATGAACAAGGG | [SEQ ID | [SEQ ID | ACAUGAACAAG |
| | | | | NO: 687] | NO: 1695] | GCTGATTTGGGA | NO: 1215] | NO: 1890] | GGGCUGAUUUG |
| | | | | | | GTATTAGTCCGT | | | GGAGUAUUAGU |
| | | | | | | CCCAACTCATCC | | | CCGUCCCAACU |
| | | | | | | CCTTATTCTTGT | | | CAUCCCCUUAU |
| | | | | | | GTCTGTTAGGCT | | | UCUUGUGUCUG |
| | | | | | | ATTCCACGGACC | | | UUAGGCUAUUC |
| | | | | | | TGGGGCTTTGCT | | | CACGGACCUGG |
| | | | | | | TATATGCC | | | GGCUUUGCUUA |
| | | | | | | [SEQ ID NO: 1788] | | | UAUGCC |
| | | | | | | | | | [SEQ ID NO: 1985] |
| 2602 | miR-130a | -2.30701 | -0.14983 | TTTAGTAGT | ATTCTATGG | GCAGGGCCGGC | UUUAGUAG | AUUCUAUG | GCAGGGCCGGC |
| | | | | TGATCCATA | AGCAACTA | ATGCCTCTGCTG | UUGAUCCA | GAGCAACU | AUGCCUCUGCU |
| | | | | GATT | TTAAC | CTGGCCAATTCT | UAGAUU | AUUAAC | GCUGGCCAAUU |
| | | | | [SEQ ID | [SEQ ID | ATGGAGCAACT | [SEQ ID | [SEQ ID | CUAUGGAGCAA |
| | | | | NO: 1616] | NO: 1696] | ATTAACCTGTCT | NO: 202] | NO: 1891] | CUAUUAACCUG |
| | | | | | | GCACCTGTCACT | (Same guide as | | UCUGCACCUGU |
| | | | | | | AGTTTAGTAGTT | XD-14837) | | CACUAGUUUAG |
| | | | | | | GATCCATAGATT | | | UAGUUGAUCCA |
| | | | | | | TGGCCGTGTAGT | | | UAGAUUUGGCC |
| | | | | | | GCTACCCAGCGC | | | GUGUAGUGCUA |
| | | | | | | TGGCTGCCTCCT | | | CCCAGCGCUGG |
| | | | | | | CAGCATTG | | | CUGCCUCCUCA |
| | | | | | | [SEQ ID NO: 1789] | | | GCAUUG |
| | | | | | | | | | SEQ ID NO: 1986] |
| 3255 | miR- | -2.30348 | 0.418205 | ATTGCGTGG | CCAAGCTTA | GAGCTCAGTCA | AUUGCGUG | CCAAGCUU | GAGCUCAGUCA |
| | 190a_M | | | AGTAAGCT | CTCCACGCA | AACCTGGATGCC | GAGUAAGC | ACUCCACG | AACCUGGAUGC |
| | | | | GGTGG | CG | TTTTCTGCAGGC | UGGUGG | CACG | CUUUUCUGCAG |
| | | | | [SEQ ID | [SEQ ID | GTCTGTGATTGC | [SEQ ID | [SEQ ID | GCGUCUGUGAU |
| | | | | NO: 617] | NO: 1697] | GTGGAGTAAGC | NO: 306] | NO: 1892] | UGCGUGGAGUA |
| | | | | | | TGGTGGTGTTAT | (Same guide as | | AGCUGGUGGUG |
| | | | | | | TTAATCCACCAA | XD-14889) | | UUAUUUAAUCC |
| | | | | | | GCTTACTCCACG | | | ACCAAGCUUAC |
| | | | | | | CACGCTACAGTC | | | UCCACGCACGC |
| | | | | | | TCTTGCCCTGTC | | | UACAGUCUCUU |
| | | | | | | TCCGGGGGTTCC | | | GCCCUGUCUCC |
| | | | | | | TAATAAAG | | | GGGGGUUCCUA |
| | | | | | | [SEQ ID NO: 1790] | | | AUAAAG |
| | | | | | | | | | [SEQ ID NO: 1987] |
| 3338 | miR-132 | -2.2984 | -0.03531 | TACATGAG | TAAGTCTCA | GCCGTCCGCGCG | UACAUGAG | UAAGUCUC | GCCGUCCGCGC |
| | | | | GATGCTGA | GCCTACTCA | CCCCGCCCCCGC | GAUGCUGA | AGCCUACU | GCCCCGCCCCC |
| | | | | GACTGA | TGTA | GTCTCCAGGGTA | GACUGA | CAUGUA | GCGUCUCCAGG |
| | | | | [SEQ ID | [SEQ ID | AGTCTCAGCCTA | [SEQ ID | [SEQ ID | GUAAGUCUCAG |
| | | | | NO: 1620] | NO: 1698] | CTCATGTACTGT | NO: 314] | NO: 1893] | CCUACUCAUGU |
| | | | | | | GGGAACTGGAG | (Same guide as | | ACUGUGGGAAC |
| | | | | | | GTACATGAGGA | XD-14893) | | UGGAGGUACAU |
| | | | | | | TGCTGAGACTGA | | | GAGGAUGCUGA |
| | | | | | | CCCCGCAGCAC | | | GACUGACCCCG |
| | | | | | | GCCCACGCGCC | | | CAGCACGCCCA |
| | | | | | | GCGCCACGCCG | | | CGCGCCGCGCC |
| | | | | | | CGCCCCGAGCC | | | ACGCCGCGCCC |
| | | | | | | [SEQ ID NO: 1791] | | | CGAGCC |
| | | | | | | | | | [SEQ ID NO: 1988] |
| 3842 | miR-1-1 | -2.27963 | -0.68707 | AACGTGAG | TTCGATCCA | CATGCAGACTGC | AACGUGAG | UUCGAUCC | CAUGCAGACUG |
| | | | | AAGGATGG | TCCTTCTCA | CTGCTTGGGTTC | AAGGAUGG | AUCCUUCU | CCUGCUUGGGU |
| | | | | ATCGTA | GAGTT | GATCCATCCTTC | AUCGUA | CAGAGUU | UCGAUCCAUCC |
| | | | | [SEQ ID | [SEQ ID | TCAGAGTTTATG | [SEQ ID | [SEQ ID | UUCUCAGAGUU |
| | | | | NO: 1625] | NO: 1699] | GACCTGCTAAGC | NO: 1824] | NO: 1894] | UAUGGACCUGC |
| | | | | | | TAAACGTGAGA | | | UAAGCUAAACG |
| | | | | | | AGGATGGATCG | | | UGAGAAGGAUG |
| | | | | | | TACTCAGGCCGG | | | GAUCGUACUCA |
| | | | | | | GACCTCTCTCGC | | | GGCCGGGACCU |
| | | | | | | CGCACTGAGGG | | | CUCUCGCCGCA |
| | | | | | | GCACTCCACACC | | | CUGAGGGGCAC |
| | | | | | | ACGGGGGCC | | | UCCACACCACG |
| | | | | | | [SEQ ID NO: 1792] | | | GGGGCC |
| | | | | | | | | | [SEQ ID NO: 1989] |
| 3330 | miR-155E | -2.26554 | 0.033188 | TATGCTGAG | CCACATTAC | CTGGAGGCTTGC | UAUGCUGA | CCACAUUA | CUGGAGGCUUG |
| | | | | ACTGATAAT | AGCTCAGC | TTTGGGCTGTAT | GACUGAUA | CAGCUCAG | CUUUGGGCUGU |
| | | | | GTGG | ATA | GCTGTATGCTGA | AUGUGG | CAUA | AUGCUGUAUGC |
| | | | | SEQ ID | [SEQ ID | GACTGATAATGT | [SEQ ID | SEQ ID | UGAGACUGAUA |
| | | | | NO: 1614] | NO: 1700] | GGTTTTGGCCTC | NO: 1811] | NO: 1895] | AUGUGGUUUUG |
| | | | | | | TGACTGACCACA | | | GCCUCUGACUG |
| | | | | | | TTACAGCTCAGC | | | ACCACAUUACA |
| | | | | | | ATACAGGACAA | | | GCUCAGCAUAC |
| | | | | | | GGCCCTTTATCA | | | AGGACAAGGCC |
| | | | | | | GCACTCACATGG | | | CUUUAUCAGCA |
| | | | | | | AACAAATGGCC | | | CUCACAUGGAA |
| | | | | | | ACCGTGGG | | | CAAAUGGCCAC |
| | | | | | | [SEQ ID NO: 1793] | | | CGUGGG |
| | | | | | | | | | [SEQ ID NO: 1990] |
| 1162 | miR-122 | -2.2647 | -0.33024 | AACTGTACC | CAGACTTTG | GGCTACAGAGTT | AACUGUAC | CAGACUUU | GGCUACAGAGU |
| | | | | ACAACAAA | TTATGGTAC | TCCTTAGCAGAG | CACAACAA | GUUAUGGU | UUCCUUAGCAG |
| | | | | GTCTG | ATGT | CTGAACTGTACC | AGUCUG | ACAUGU | AGCUGAACUGU |
| | | | | [SEQ ID | [SEQ ID | ACAACAAAGTC | [SEQ ID | [SEQ ID | ACCACAACAAA |
| | | | | NO: 652] | NO: 1701] | TGTGTCTAAACT | NO: 1180] | NO: 1896] | GUCUGUGUCUA |
| | | | | | | ATCAGACTTTGT | | | AACUAUCAGAC |
| | | | | | | TATGGTACATGT | | | UUUGUUAUGGU |
| | | | | | | TAGCTACTGCTA | | | ACAUGUUAGCU |
| | | | | | | GGCAATCCTTCC | | | ACUGCUAGGCA |
| | | | | | | CTCGATAAATGT | | | AUCCUUCCCUC |
| | | | | | | CTTGGCATCGTT | | | GAUAAAUGUCU |
| | | | | | | TGCTTTG | | | UGGCAUCGUUU |
| | | | | | | [SEQ ID NO: 1794] | | | GCUUUG |
| | | | | | | | | | [SEQ ID NO: 1991] |
| 3301 | miR-122_M | -2.26423 | 0.053866 | TGAACAAG | TCCCAAATC | GGCTACAGAGTT | UGAACAAG | UCCCAAAU | GGCUACAGAGU |
| | | | | GGGCTGATT | AGACCCTTG | TGCTTAGCAGAG | GGGCUGAU | CAGACCCU | UUGCUUAGCAG |
| | | | | TGGGA | TGAA | CTGTGAACAAG | UUGGGA | UGUGAA | AGCUGUGAACA |
| | | | | [SEQ ID | [SEQ ID | GGGCTGATTTGG | [SEQ ID | SEQ ID | AGGGGCUGAUU |
| | | | | NO: 687] | NO: 1702] | GATGTCTAAACT | NO: 1215] | NO: 1897] | UGGGAUGUCUA |
| | | | | | | ATTCCCAAATCA | | | AACUAUUCCCA |
| | | | | | | GACCCTTGTGAA | | | AAUCAGACCCU |
| | | | | | | TAGCTACTGCTA | | | UGUGAAUAGCU |
| | | | | | | GGCCATCCTTCC | | | ACUGCUAGGCC |
| | | | | | | CTCGATAAATGT | | | AUCCUUCCCUC |
| | | | | | | CTTGGCATCGTT | | | GAUAAAUGUCU |
| | | | | | | TGCTTTG | | | UGGCAUCGUUU |
| | | | | | | [SEQ ID NO: 1795] | | | GCUUUG |
| | | | | | | | | | [SEQ ID NO: 1992] |
| 3341 | miR- | -2.26383 | 0.394316 | ATAGACAT | GTCAGCATC | GAGCTCAGTCA | AUAGACAU | GUCAGCAU | GAGCUCAGUCA |
| | 190a_M | | | GAGGATGC | CTCATGTCT | AACCTGGATGCC | GAGGAUGC | CCUCAUGU | AACCUGGAUGC |
| | | | | TGAGAC | CG | TTTTCTGCAGGC | UGAGAC | CUCG | CUUUUCUGCAG |
| | | | | [SEQ ID | [SEQ ID | GTCTGTGATAGA | [SEQ ID | [SEQ ID | GCGUCUGUGAU |
| | | | | NO: 1617] | NO: 1703] | CATGAGGATGCT | NO: 1813] | NO: 1898] | AGACAUGAGGA |
| | | | | | | GAGACTGTTATT | | | UGCUGAGACUG |
| | | | | | | TAATCCAGTCAG | | | UUAUUUAAUCC |
| | | | | | | CATCCTCATGTC | | | AGUCAGCAUCC |
| | | | | | | TCGCTACAGTCT | | | UCAUGUCUCGC |
| | | | | | | CTTGCCCTGTCT | | | UACAGUCUCUU |
| | | | | | | CCGGGGGTTCCT | | | GCCCUGUCUCC |
| | | | | | | AATAAAG | | | GGGGGUUCCUA |
| | | | | | | [SEQ ID NO: 1796] | | | AUAAAG |
| | | | | | | | | | [SEQ ID NO: 1993] |
| 2945 | miR-100_M | -2.26187 | 0.044364 | TGTAGTAG | TCAGCCCA | CCCAAAAGAGA | UGUAGUAG | UCAGCCCA | CCCAAAAGAGA |
| | | | | AAGGCTTTG | AGACTTCTA | GAAGATATTGAT | AAGGCUUU | AGACUUCU | GAAGAUAUUGA |
| | | | | GCTGA | ATACT | GCCTGTTGCCAC | GGCUGA | AAUACU | UGCCUGUUGCC |
| | | | | [SEQ ID | [SEQ ID | ATGTAGTAGAA | [SEQ ID | [SEQ ID | ACAUGUAGUAG |
| | | | | NO: 685] | NO: 1678] | GGCTTTGGCTGA | NO: 1213] | NO: 1873] | AAGGCUUUGGC |
| | | | | | | GTATTAGTCCGT | (Same guide as | | UGAGUAUUAGU |
| | | | | | | CAGCCCAAGAC | XD-14860) | | CCGUCAGCCCA |
| | | | | | | TTCTAATACTTG | | | AGACUUCUAAU |
| | | | | | | TGTCTGTTAGGC | | | ACUUGUGUCUG |
| | | | | | | TATTCCACGGAC | | | UUAGGCUAUUC |
| | | | | | | CTGGGGCTTTGC | | | CACGGACCUGG |
| | | | | | | TTATATGCC | | | GGCUUUGCUUA |
| | | | | | | [SEQ ID NO: 1797] | | | UAUGCC |
| | | | | | | | | | [SEQ ID NO: 1994] |
| 1756 | miR-1-1_M | -2.26119 | 0.153277 | TTCGGGTTG | AGACTTCA | CATGCAGACTGC | UUCGGGUU | AGACUUCA | CAUGCAGACUG |
| | | | | AAATCTGA | GATTTCAAC | CTGCTTGGGAGA | GAAAUCUG | GAUUUCAA | CCUGCUUGGGA |
| | | | | AGTGT | CGAGAA | CTTCAGATTTCA | AAGUGU | CCGAGAA | GACUUCAGAUU |
| | | | | [SEQ ID | [SEQ ID | ACCGAGAATAT | [SEQ ID | [SEQ ID | UCAACCGAGAA |
| | | | | NO: 607] | NO: 1704] | GGACCTGCTAA | NO: 108] | NO: 1907] | UAUGGACCUGC |
| | | | | | | GCTATTCGGGTT | (Same guide as | | UAAGCUAUUCG |
| | | | | | | GAAATCTGAAG | XD-14790) | | GGUUGAAAUCU |
| | | | | | | TGTCTCAGGCCG | | | GAAGUGUCUCA |
| | | | | | | GGACCTCTTCCG | | | GGCCGGGACCU |
| | | | | | | CCGCACTGAGG | | | CUUCCGCCGCA |
| | | | | | | GGCACTCCACAC | | | CUGAGGGGCAC |
| | | | | | | CACGGGGGCC | | | UCCACACCACG |
| | | | | | | [SEQ ID NO: 1798] | | | GGGGCC |
| | | | | | | | | | [SEQ ID NO: 1995] |
| 3845 | miR-1-1_M | -2.26073 | -0.20695 | TTGAACGTG | GTTCCATCC | CATGCAGACTGC | UUGAACGU | GUUCCAUC | CAUGCAGACUG |
| | | | | AGAAGGAT | TTCTCACGT | CTGCTTGGGGTT | GAGAAGGA | CUUCUCAC | CCUGCUUGGGG |
| | | | | GGATC | CGCAA | CCATCCTTCTCA | UGGAUC | GUCGCAA | UUCCAUCCUUC |
| | | | | [SEQ ID | [SEQ ID | CGTCGCAATATG | [SEQ ID | [SEQ ID | UCACGUCGCAA |
| | | | | NO: 696] | NO: 1705] | GACCTGCTAAGC | NO: 1224] | NO: 1906] | UAUGGACCUGC |
| | | | | | | TATTGAACGTGA | | | UAAGCUAUUGA |
| | | | | | | GAAGGATGGAT | | | ACGUGAGAAGG |
| | | | | | | CCTCAGGCCGG | | | AUGGAUCCUCA |
| | | | | | | GACCTCTTCCGC | | | GGCCGGGACCU |
| | | | | | | CGCACTGAGGG | | | CUUCCGCCGCA |
| | | | | | | GCACTCCACACC | | | CUGAGGGGCAC |
| | | | | | | ACGGGGGCC | | | UCCACACCACG |
| | | | | | | [SEQ ID NO: 1799] | | | GGGGCC |
| | | | | | | | | | [SEQ ID NO: 1996] |
| 3043 | miR-190a | -2.26041 | 0.277711 | TTTGGTGCA | AGCGTTTGT | GAGCTCAGTCA | UUUGGUGC | AGCGUUUG | GAGCUCAGUCA |
| | | | | AAACAAAC | TTTGCACCA | AACCTGGATGCC | AAAACAAA | UUUUGCAC | AACCUGGAUGC |
| | | | | AGGCT | CC | TTTTCTGCAGGC | CAGGCU | CACC | CUUUUCUGCAG |
| | | | | [SEQ ID | [SEQ ID | CTCTGTGTTTGG | [SEQ ID | [SEQ ID | GCCUCUGUGUU |
| | | | | NO: 1615] | NO: 1664] | TGCAAAACAAA | NO: 1812] | NO: 1859] | UGGUGCAAAAC |
| | | | | | | CAGGCTTGTTAT | | | AAACAGGCUUG |
| | | | | | | TTAATCCAAGCG | | | UUAUUUAAUCC |
| | | | | | | TTTGTTTTGCAC | | | AAGCGUUUGUU |
| | | | | | | CACCCTACAGTG | | | UUGCACCACCC |
| | | | | | | TCTTGCCCTGTC | | | UACAGUGUCUU |
| | | | | | | TCCGGGGGTTCC | | | GCCCUGUCUCC |
| | | | | | | TAATAAAG | | | GGGGGUUCCUA |
| | | | | | | [SEQ ID NO: 1800] | | | AUAAAG |
| | | | | | | | | | [SEQ ID NO: 1997] |
| 1162 | miR-155E | -2.26036 | -0.20831 | AACTGTACC | CAGACTTTT | CTGGAGGCTTGC | AACUGUAC | CAGACUUU | CUGGAGGCUUG |
| | | | | ACAACAAA | TGGGTACA | TTTGGGCTGTAT | CACAACAA | UUGGGUAC | CUUUGGGCUGU |
| | | | | GTCTG | GTT | GCTGAACTGTAC | AGUCUG | AGUU | AUGCUGAACUG |
| | | | | [SEQ ID | [SEQ ID | CACAACAAAGT | [SEQ ID | [SEQ ID | UACCACAACAA |
| | | | | NO: 652] | NO: 1706] | CTGTTTTGGCCT | NO: 1180] | NO: 1905] | AGUCUGUUUUG |
| | | | | | | CTGACTGACAG | | | GCCUCUGACUG |
| | | | | | | ACTTTTTGGGTA | | | ACAGACUUUUU |
| | | | | | | CAGTTCAGGAC | | | GGGUACAGUUC |
| | | | | | | AAGGCCCTTTAT | | | AGGACAAGGCC |
| | | | | | | CAGCACTCACAT | | | CUUUAUCAGCA |
| | | | | | | GGAACAAATGG | | | CUCACAUGGAA |
| | | | | | | CCACCGTGGG | | | CAAAUGGCCAC |
| | | | | | | [SEQ ID NO: 1801] | | | CGUGGG |
| | | | | | | | | | [SEQ ID NO: 1998] |
| 3273 | miR-1-1_M | -2.24883 | 0.09481 | TAGGACTGT | CTATATGTT | CATGCAGACTGC | UAGGACUG | CUAUAUGU | CAUGCAGACUG |
| | | | | AGGCAACA | GCCTACAGT | CTGCTTGGGCTA | UAGGCAAC | UGCCUACA | CCUGCUUGGGC |
| | | | | TATTG | GACTA | TATGTTGCCTAC | AUAUUG | GUGACUA | UAUAUGUUGCC |
| | | | | [SEQ ID | [SEQ ID | AGTGACTATATG | [SEQ ID | [SEQ ID | UACAGUGACUA |
| | | | | NO: 1628] | NO: 1691] | GACCTGCTAAGC | NO: 1821] | NO: 1886] | UAUGGACCUGC |
| | | | | | | TATAGGACTGTA | | | UAAGCUAUAGG |
| | | | | | | GGCAACATATTG | | | ACUGUAGGCAA |
| | | | | | | CTCAGGCCGGG | | | CAUAUUGCUCA |
| | | | | | | ACCTCTTCCGCC | | | GGCCGGGACCU |
| | | | | | | GCACTGAGGGG | | | CUUCCGCCGCA |
| | | | | | | CACTCCACACCA | | | CUGAGGGGCAC |
| | | | | | | CGGGGGCC | | | UCCACACCACG |
| | | | | | | [SEQ ID NO: 1802] | | | GGGGCC |
| | | | | | | | | | [SEQ ID NO: 1999] |
| 2586 | miR-190a | -2.24846 | 0.172174 | TAGATTCAG | CCATTCTAC | GAGCTCAGTCA | UAGAUUCA | CCAUUCUA | GAGCUCAGUCA |
| | | | | AAGTAGAA | TTCTGAATC | AACCTGGATGCC | GAAGUAGA | CUUCUGAA | AACCUGGAUGC |
| | | | | CTTGG | CC | TTTTCTGCAGGC | ACUUGG | UCCC | CUUUUCUGCAG |
| | | | | [SEQ ID | [SEQ ID | CTCTGTGTAGAT | SEQ ID | [SEQ ID | GCCUCUGUGUA |
| | | | | NO: 1621] | NO: 1661] | TCAGAAGTAGA | NO: 1816] | NO: 1856] | GAUUCAGAAGU |
| | | | | | | ACTTGGTGTTAT | | | AGAACUUGGUG |
| | | | | | | TTAATCCACCAT | | | UUAUUUAAUCC |
| | | | | | | TCTACTTCTGAA | | | ACCAUUCUACU |
| | | | | | | TCCCCTACAGTG | | | UCUGAAUCCCC |
| | | | | | | TCTTGCCCTGTC | | | UACAGUGUCUU |
| | | | | | | TCCGGGGGTTCC | | | GCCCUGUCUCC |
| | | | | | | TAATAAAG | | | |
| | | | | | | [SEQ ID NO: 1803] | | | GGGGGUUCCUA |
| | | | | | | | | | AUAAAG |
| | | | | | | | | | [SEQ ID NO: 2000] |
| 3132 | miR-122 M | -2.24518 | 0.049515 | ATGTCTTGG | CCAGTGAA | GGCTACAGAGTT | AUGUCUUG | CCAGUGAA | GGCUACAGAGU |
| | | | | CTTGATTCA | TCACGCCA | TGCTTAGCAGAG | GCUUGAUU | UCACGCCA | UUGCUUAGCAG |
| | | | | CTGG | AGAACT | CTGATGTCTTGG | CACUGG | AGAACU | AGCUGAUGUCU |
| | | | | [SEQ ID | [SEQ ID | CTTGATTCACTG | [SEQ ID | [SEQ ID | UGGCUUGAUUC |
| | | | | NO: 1631] | NO: 1707] | GTGTCTAAACTA | NO: 1826] | NO: 1904] | ACUGGUGUCUA |
| | | | | | | TCCAGTGAATCA | | | AACUAUCCAGU |
| | | | | | | CGCCAAGAACTT | | | GAAUCACGCCA |
| | | | | | | AGCTACTGCTAG | | | AGAACUUAGCU |
| | | | | | | GCCATCCTTCCC | | | ACUGCUAGGCC |
| | | | | | | TCGATAAATGTC | | | AUCCUUCCCUC |
| | | | | | | TTGGCATCGTTT | | | GAUAAAUGUCU |
| | | | | | | GCTTTG | | | UGGCAUCGUUU |
| | | | | | | [SEQ ID NO: 1804] | | | GCUUUG |
| | | | | | | | | | [SEQ ID NO: 2001] |
| 3842 | miR-1-1_M | -2.24315 | -0.38269 | AACGTGAG | TTCGATCCA | CATGCAGACTGC | AACGUGAG | UUCGAUCC | CAUGCAGACUG |
| | | | | AAGGATGG | TCCTTCTCA | CTGCTTGGGTTC | AAGGAUGG | AUCCUUCU | CCUGCUUGGGU |
| | | | | ATCGTA | GAGTT | GATCCATCCTTC | AUCGUA | CAGAGUU | UCGAUCCAUCC |
| | | | | [SEQ ID | [SEQ ID | TCAGAGTTTATG | [SEQ ID | [SEQ ID | UUCUCAGAGUU |
| | | | | NO: 1625] | NO: 1699] | GACCTGCTAAGC | NO: 1824] | NO: 1894] | UAUGGACCUGC |
| | | | | | | TAAACGTGAGA | | | UAAGCUAAACG |
| | | | | | | AGGATGGATCG | | | UGAGAAGGAUG |
| | | | | | | TACTCAGGCCGG | | | GAUCGUACUCA |
| | | | | | | GACCTCTTCCGC | | | GGCCGGGACCU |
| | | | | | | CGCACTGAGGG | | | CUUCCGCCGCA |
| | | | | | | GCACTCCACACC | | | CUGAGGGGCAC |
| | | | | | | ACGGGGGCC | | | UCCACACCACG |
| | | | | | | [SEQ ID NO: 1805] | | | GGGGCC |
| | | | | | | | | | [SEQ ID NO: 2002] |
| 2928 | miR-1-1 | -2.24149 | 0.19907 | TCTGAGAG | ATCCCACGT | CATGCAGACTGC | UCUGAGAG | AUCCCACG | CAUGCAGACUG |
| | | | | AAGGAACG | TCCTTCTCT | CTGCTTGGGATC | AAGGAACG | UUCCUUCU | CCUGCUUGGGA |
| | | | | TGGGTT | GAAGA | CCACGTTCCTTC | UGGGUU | CUGAAGA | UCCCACGUUCC |
| | | | | [SEQ ID | [SEQ ID | TCTGAAGATATG | [SEQ ID | [SEQ ID | UUCUCUGAAGA |
| | | | | NO: 668] | NO: 1708] | GACCTGCTAAGC | NO: 1196] | NO: 1902] | UAUGGACCUGC |
| | | | | | | TATCTGAGAGA | | | UAAGCUAUCUG |
| | | | | | | AGGAACGTGGG | | | AGAGAAGGAAC |
| | | | | | | TTCTCAGGCCGG | | | GUGGGUUCUCA |
| | | | | | | GACCTCTCTCGC | | | GGCCGGGACCU |
| | | | | | | CGCACTGAGGG | | | CUCUCGCCGCA |
| | | | | | | GCACTCCACACC | | | CUGAGGGGCAC |
| | | | | | | ACGGGGGCC | | | UCCACACCACG |
| | | | | | | [SEQ ID NO: 1806] | | | GGGGCC |
| | | | | | | | | | [SEQ ID NO: 2003] |
| 1231 | miR-1-1_M | -2.24102 | 0.10817 | TTCACTTTA | CAGCTATCA | CATGCAGACTGC | UUCACUUU | CAGCUAUC | CAUGCAGACUG |
| | | | | GCACTGAT | GTGCTAAA | CTGCTTGGGCAG | AGCACUGA | AGUGCUAA | CCUGCUUGGGC |
| | | | | AGCAG | GCGGAA | CTATCAGTGCTA | UAGCAG | AGCGGAA | AGCUAUCAGUG |
| | | | | [SEQ ID | [SEQ ID | AAGCGGAATAT | [SEQ ID | [SEQ ID | CUAAAGCGGAA |
| | | | | NO: 1627] | NO: 1709] | GGACCTGCTAA | NO: 1825] | NO: 1903] | UAUGGACCUGC |
| | | | | | | GCTATTCACTTT | | | UAAGCUAUUCA |
| | | | | | | AGCACTGATAG | | | CUUUAGCACUG |
| | | | | | | CAGCTCAGGCC | | | AUAGCAGCUCA |
| | | | | | | GGGACCTCTTCC | | | GGCCGGGACCU |
| | | | | | | GCCGCACTGAG | | | CUUCCGCCGCA |
| | | | | | | GGGCACTCCAC | | | CUGAGGGGCAC |
| | | | | | | ACCACGGGGGC | | | UCCACACCACG |
| | | | | | | C | | | GGGGCC |
| | | | | | | [SEQ ID NO: 1807] | | | [SEQ ID NO: 2004] |
| 1578 | miR-100 M | -2.24051 | -0.33444 | TGGAATTTC | ACAGCAAT | CCCAAAAGAGA | UGGAAUUU | ACAGCAAU | CCCAAAAGAGA |
| | | | | TCTGAACTG | TCCGAGAA | GAAGATATTGAT | CUCUGAAC | UCCGAGAA | GAAGAUAUUGA |
| | | | | CTGT | ACTCCT | GCCTGTTGCCAC | UGCUGU | ACUCCU | UGCCUGUUGCC |
| | | | | [SEQ ID | [SEQ ID | ATGGAATTTCTC | [SEQ ID | [SEQ ID | ACAUGGAAUUU |
| | | | | NO: 1626] | NO: 1665] | TGAACTGCTGTG | NO: 1820] | NO: 1860] | CUCUGAACUGC |
| | | | | | | TATTAGTCCGAC | | | UGUGUAUUAGU |
| | | | | | | AGCAATTCCGA | | | CCGACAGCAAU |
| | | | | | | GAAACTCCTTGT | | | UCCGAGAAACU |
| | | | | | | GTCTGTTAGGCT | | | CCUUGUGUCUG |
| | | | | | | ATTCCACGGACC | | | UUAGGCUAUUC |
| | | | | | | TGGGGCTTTGCT | | | CACGGACCUGG |
| | | | | | | TATATGCC | | | GGCUUUGCUUA |
| | | | | | | [SEQ ID NO: 1808] | | | UAUGCC |
| | | | | | | | | | [SEQ ID NO: 2005] |
| 967 | miR-190a | -2.23671 | -0.08895 | ACTGATGTA | TGGCATATA | GAGCTCAGTCA | ACUGAUGU | UGGCAUAU | GAGCUCAGUCA |
| | | | | AGTATATG | CTTACATCA | AACCTGGATGCC | AAGUAUAU | ACUUACAU | AACCUGGAUGC |
| | | | | AACCA | AG | TTTTCTGCAGGC | GAACCA | CAAG | CUUUUCUGCAG |
| | | | | [SEQ ID | [SEQ ID | CTCTGTGACTGA | [SEQ ID | [SEQ ID | GCCUCUGUGAC |
| | | | | NO: 1619] | NO: 1642] | TGTAAGTATATG | NO: 1815] | NO: 1837] | UGAUGUAAGUA |
| | | | | | | AACCATGTTATT | | | UAUGAACCAUG |
| | | | | | | TAATCCATGGCA | | | UUAUUUAAUCC |
| | | | | | | TATACTTACATC | | | AUGGCAUAUAC |
| | | | | | | AAGCTACAGTGT | | | UUACAUCAAGC |
| | | | | | | CTTGCCCTGTCT | | | UACAGUGUCUU |
| | | | | | | CCGGGGGTTCCT | | | GCCCUGUCUCC |
| | | | | | | AATAAAG | | | GGGGGUUCCUA |
| | | | | | | [SEQ ID NO: 1809] | | | AUAAAG |
| | | | | | | | | | [SEQ ID NO: 2006] |
| 1436 | miR155-M | -2.22884 | 0.141256 | TGAGTTATC | GCCCTTAGA | CCTGGAGGCTTG | UGAGUUAU | GCCCUUAG | CCUGGAGGCUU |
| | | | | TCTTTCTAA | AGGATAAC | CTGAAGGCTGTA | CUCUUUCU | AAGGAUAA | GCUGAAGGCUG |
| | | | | GGGC | TCA | TGCTGTGAGTTA | AAGGGC | CUCA | UAUGCUGUGAG |
| | | | | [SEQ ID | [SEQ ID | TCTCTTTCTAAG | [SEQ ID | [SEQ ID | UUAUCUCUUUC |
| | | | | NO: 1632] | NO: 1710] | GGCTTTTGGCCA | NO: 1827] | NO: 1900] | UAAGGGCUUUU |
| | | | | | | CTGACTGAGCCC | | | GGCCACUGACU |
| | | | | | | TTAGAAGGATA | | | GAGCCCUUAGA |
| | | | | | | ACTCACAGGAC | | | AGGAUAACUCA |
| | | | | | | ACAAGGCCTGTT | | | CAGGACACAAG |
| | | | | | | ACTAGCACTCAC | | | GCCUGUUACUA |
| | | | | | | ATGGAACAAAT | | | GCACUCACAUG |
| | | | | | | GGCCACCGG | | | GAACAAAUGGC |
| | | | | | | [SEQ ID NO: 1810] | | | CACCGG |
| | | | | | | | | | [SEQ ID NO: 2007] |

TABLE 24
Top 10 miRNAs for each miR backbone

| | Atxn2 | | | | | | | | |
|---|---|---|---|---|---|---|---|---|---|
| | Tar- | Atxn2 | | | | | | | |
| | get- | low/ | | Guide | | | | | |
| miR | ing | unsort | T1/T0 | Se- | Passenger | MiR | Guide | Passenger | MiR |
| Back- | Posi- | log2 | log2 | quence | Sequence | Cassette | Sequence | Sequence | Cassette |
| bone | tion | FC | FC | (DNA) | (DNA) | (DNA) | (RNA) | (RNA) | (RNA) |
| miR- | 1755 | −2.5734 | −0.10352 | TCGGGTTGAA | CTCACTTCAG | CATGCAGACT | UCGGGUUGAA | CUCACUUCAG | CAUGCAGACU |
| 1-1 | | | | ATCTGAAGTG | ATTTCAACGA | GCCTGCTTGG | AUCUGAAGUG | AUUUCAACGA | GCCUGCUUGG |
| | | | | TG | CGA | GCTCACTTCA | UG | CGA | GCUCACUUCA |
| | | | | [SEQ ID | [SEQ ID | GATTTCAACG | [SEQ ID | [SEQ ID | GAUUUCAACG |
| | | | | NO: | NO: | ACGATATGGA | NO: | NO: | ACGAUAUGGA |
| | | | | 657] | 1645] | CCTGCTAAGC | 1185] | 1840] | CCUGCUAAGC |
| | | | | | | TATCGGGTTG | | | UAUCGGGUUG |
| | | | | | | AAATCTGAAG | | | AAAUCUGAAG |
| | | | | | | TGTGCTCAGG | | | UGUGCUCAGG |
| | | | | | | CCGGGACCTC | | | CCGGGACCUC |
| | | | | | | TCTCGCCGCA | | | UCUCGCCGCA |
| | | | | | | CTGAGGGGCA | | | CUGAGGGGCA |
| | | | | | | CTCCACACCA | | | CUCCACACCA |
| | | | | | | CGGGGGCC | | | CGGGGGCC |
| | | | | | | [SEQ ID | | | [SEQ ID |
| | | | | | | NO: | | | NO: |
| | | | | | | 1726] | | | 1923] |
| miR- | 2943 | −2.54936 | 0.148183 | TAGTAGAAGG | TGTCAGCCAA | CATGCAGACT | UAGUAGAAGG | UGUCAGCCAA | CAUGCAGACU |
| 1-1 | | | | CTTTGGCTGA | AGCCTTCTCC | GCCTGCTTGG | CUUUGGCUGA | AGCCUUCUCC | GCCUGCUUGG |
| | | | | GA | CTA | GTGTCAGCCA | GA | CUA | GUGUCAGCCA |
| | | | | [SEQ ID | [SEQ ID | AAGCCTTCTC | [SEQ ID | [SEQ ID | AAGCCUUCUC |
| | | | | NO: | NO: | CCTATATGGA | NO: | NO: | CCUAUAUGGA |
| | | | | 683] | 1650] | CCTGCTAAGC | 1211] | 1845] | CCUGCUAAGC |
| | | | | | | TATAGTAGAA | | | UAUAGUAGAA |
| | | | | | | GGCTTTGGCT | | | GGCUUUGGCU |
| | | | | | | GAGACTCAGG | | | GAGACUCAGG |
| | | | | | | CCGGGACCTC | | | CCGGGACCUC |
| | | | | | | TCTCGCCGCA | | | UCUCGCCGCA |
| | | | | | | CTGAGGGGCA | | | CUGAGGGGCA |
| | | | | | | CTCCACACCA | | | CUCCACACCA |
| | | | | | | CGGGGGCC | | | CGGGGGCC |
| | | | | | | [SEQ ID | | | [SEQ ID |
| | | | | | | NO: | | | NO: |
| | | | | | | 1731] | | | 1928] |
| miR- | 3338 | −2.52716 | −0.2585 | TACATGAGGA | TGAGTCTCAG | CATGCAGACT | UACAUGAGGA | UGAGUCUCAG | CAUGCAGACU |
| 1-1 | | | | TGCTGAGACT | CATCCTCACG | GCCTGCTTGG | UGCUGAGACU | CAUCCUCACG | GCCUGCUUGG |
| | | | | GA | GTA | GTGAGTCTCA | GA | GUA | GUGAGUCUCA |
| | | | | [SEQ ID | [SEQ ID | GCATCCTCAC | [SEQ ID | [SEQ ID | GCAUCCUCAC |
| | | | | NO: | NO: | GGTATATGGA | NO: | NO: | GGUAUAUGGA |
| | | | | 1620] | 1651] | CCTGCTAAGC | 314] | 1846] | CCUGCUAAGC |
| | | | | | | TATACATGAG | (Same | | UAUACAUGAG |
| | | | | | | GATGCTGAGA | guide | | GAUGCUGAGA |
| | | | | | | CTGACTCAGG | as | | CUGACUCAGG |
| | | | | | | CCGGGAC | XD- | | CCGGGACCUC |
| | | | | | | CTCT | 14893 | | U |
| | | | | | | CTCGCC | | | CUCGCCGCAC |
| | | | | | | GCACTGAGGG | | | UGAGGGGCAC |
| | | | | | | GCACTCCACA | | | UCCACACCAC |
| | | | | | | CCACGGGGGC | | | GGGGGCC |
| | | | | | | C | | | [SEQ ID |
| | | | | | | [SEQ ID | | | NO: |
| | | | | | | NO: | | | 1929] |
| | | | | | | 1732] | | | |
| miR- | 3302 | −2.51939 | −0.06675 | TTGAACAAGG | CGCAAATCAG | CATGCAGACT | UUGAACAAGG | CGCAAAUCAG | CAUGCAGACU |
| 1-1 | | | | GGCTGATTTG | CCCCTTGTCG | GCCTGCTTGG | GGCUGAUUUG | CCCCUUGUCG | GCCUGCUUGG |
| | | | | GG | CAA | GCGCAAATCA | GG | CAA | GCGCAAAUCA |
| | | | | [SEQ ID | [SEQ ID | GCCCCTTGTC | [SEQ ID | [SEQ ID | GCCCCUUGUC |
| | | | | NO: | NO: | GCAATATGGA | NO: | NO: | GCAAUAUGGA |
| | | | | 688] | 1647] | CCTGCTAAGC | 1216] | 1842] | CCUGCUAAGC |
| | | | | | | TATTGAACAA | | | UAUUGAACAA |
| | | | | | | GGGGCTGATT | | | GGGGCUGAUU |
| | | | | | | TGGGCTCAGG | | | UGGGCUCAGG |
| | | | | | | CCGGGACCTC | | | CCGGGACCUC |
| | | | | | | TCTCGCCGCA | | | UCUCGCCGCA |
| | | | | | | CTGAGGGGCA | | | CUGAGGGGCA |
| | | | | | | CTCCACACCA | | | CUCCACACCA |
| | | | | | | CGGGGGCC | | | CGGGGGCC |
| | | | | | | [SEQ ID | | | [SEQ ID |
| | | | | | | NO: | | | NO: |
| | | | | | | 1735] | | | 1932] |
| miR- | 3341 | −2.50291 | −0.1115 | ATAGACATGA | GACTCAGCAT | CATGCAGACT | AUAGACAUGA | GACUCAGCAU | CAUGCAGACU |
| 1-1 | | | | GGATGCTGAG | CCTCATGTGA | GCCTGCTTGG | GGAUGCUGAG | CCUCAUGUGA | GCCUGCUUGG |
| | | | | AC | TAT | GGACTCAGCA | AC | UAU | GGACUCAGCA |
| | | | | [SEQ ID | [SEQ ID | TCCTCATGTG | [SEQ ID | [SEQ ID | UCCUCAUGUG |
| | | | | NO: | NO: | ATATTATGGA | NO: | NO: | AUAUUAUGGA |
| | | | | 1617] | 1637] | CCTGCTAAGC | 1813] | 1832] | CCUGCUAAGC |
| | | | | | | TAATAGACAT | | | UAAUAGACAU |
| | | | | | | GAGGATGCTG | | | GAGGAUGCUG |
| | | | | | | AGACCTCAGG | | | AGACCUCAGG |
| | | | | | | CCGGGACCTC | | | CCGGGACCUC |
| | | | | | | TCTCGCCGCA | | | UCUCGCCGCA |
| | | | | | | CTGAGGGGCA | | | CUGAGGGGCA |
| | | | | | | CTCCACACCA | | | CUCCACACCA |
| | | | | | | CGGGGGCC | | | CGGGGGCC |
| | | | | | | [SEQ ID | | | [SEQ ID |
| | | | | | | NO: | | | NO: |
| | | | | | | 1737] | | | 1934] |
| miR- | 2945 | −2.42094 | −0.06694 | TGTAGTAGAA | TGAGCCAAAG | CATGCAGACT | UGUAGUAGAA | UGAGCCAAAG | CAUGCAGACU |
| 1-1 | | | | GGCTTTGGCT | CCTTCTACCG | GCCTGCTTGG | GGCUUUGGCU | CCUUCUACCG | GCCUGCUUGG |
| | | | | GA | ACA | GTGAGCCAAA | GA | ACA | GUGAGCCAAA |
| | | | | [SEQ ID | [SEQ ID | GCCTTCTACC | [SEQ ID | [SEQ ID | GCCUUCUACC |
| | | | | NO: | NO: | GACATATGGA | NO: | NO: | GACAUAUGGA |
| | | | | 685] | 1633] | CCTGCTAAGC | 1213] | 1828] | CCUGCUAAGC |
| | | | | | | TATGTAGTAG | (Same | | UAUGUAGUAG |
| | | | | | | AAGGCTTTGG | guide | | AAGGCUUUGG |
| | | | | | | CTGACTCAGG | as | | CUGACUCAGG |
| | | | | | | CCGGGACCTC | XD- | | CCGGGACCUC |
| | | | | | | TCTCGCCGCA | 14860) | | UCUCGCCGCA |
| | | | | | | C | | | CUGAG |
| | | | | | | TGAGGGGCAC | | | GGGCACUCCA |
| | | | | | | TCCACACCAC | | | CACCACGGGG |
| | | | | | | GGGGGCC | | | GCC |
| | | | | | | [SEQ ID | | | [SEQ ID |
| | | | | | | NO: | | | NO: |
| | | | | | | 1761] | | | 1958] |
| miR- | 3301 | −2.41082 | 0.051034 | TGAACAAGGG | TGCCAAATCA | CATGCAGACT | UGAACAAGGG | UGCCAAAUCA | CAUGCAGACU |
| 1-1 | | | | GCTGATTTGG | GCCCCTTGCG | GCCTGCTTGG | GCUGAUUUGG | GCCCCUUGCG | GCCUGCUUGG |
| | | | | GA | TCA | GTGCCAAATC | GA | UCA | GUGCCAAAUC |
| | | | | [SEQ ID | [SEQ ID | AGCCCCTTGC | [SEQ ID | [SEQ ID | AGCCCCUUGC |
| | | | | NO: | NO: | GTCATATGGA | NO: | NO: | GUCAUAUGGA |
| | | | | 687] | 1673] | CCTGCTAAGC | 1215] | 1868] | CCUGCUAAGC |
| | | | | | | TATGAACAAG | | | UAUGAACAAG |
| | | | | | | GGGCTGATTT | | | GGGCUGAUUU |
| | | | | | | GGGACTCAGG | | | GGGACUCAGG |
| | | | | | | CCGGGACCTC | | | CCGGGACCUC |
| | | | | | | TCTCGCCGCA | | | UCUCGCCGCA |
| | | | | | | CTGAGGGGCA | | | CUGAGGGGCA |
| | | | | | | CTCCACACCA | | | CUCCACACCA |
| | | | | | | CGGGGGCC | | | CGGGGGCC |
| | | | | | | [SEQ ID | | | [SEQ ID |
| | | | | | | NO: | | | NO: |
| | | | | | | 1763] | | | 1960] |
| miR- | 3043 | −2.32683 | 0.097086 | TTTGGTGCAA | ACCCTGTTTG | CATGCAGACT | UUUGGUGCAA | ACCCUGUUUG | CAUGCAGACU |
| 1-1 | | | | AACAAACAGG | TTTTGCACGA | GCCTGCTTGG | AACAAACAGG | UUUUGCACGA | GCCUGCUUGG |
| | | | | CT | AAA | GACCCTGTTT | CU | AAA | GACCCUGUUU |
| | | | | [SEQ ID | [SEQ ID | GTTTTGCACG | [SEQ ID | [SEQ ID | GUUUUGCACG |
| | | | | NO: | NO: | AAAATATGGA | NO: | NO: | AAAAUAUGGA |
| | | | | 1615] | 1690] | CCTGCTAAGC | 1812] | 1885] | CCUGCUAAGC |
| | | | | | | TATTTGGTGC | | | UAUUUGGUGC |
| | | | | | | AAAACAAACA | | | AAAACAAACA |
| | | | | | | GGCTCTCAGG | | | GGCUCUCAGG |
| | | | | | | CCGGGACCTC | | | CCGGGACCUC |
| | | | | | | TCTCGCCGCA | | | UCUCGCCGCA |
| | | | | | | CTGAGGGGCA | | | CUGAGGGGCA |
| | | | | | | CTCCACACCA | | | CUCCACACCA |
| | | | | | | CGGGGGcc | | | CGGGGGCC |
| | | | | | | [SEQ ID | | | [SEQ ID |
| | | | | | | NO: | | | NO: |
| | | | | | | 1783] | | | 1980] |
| miR- | 3273 | −2.32464 | −0.13929 | TAGGACTGTA | CTATATGTTG | CATGCAGACT | UAGGACUGUA | CUAUAUGUUG | CAUGCAGACU |
| 1-1 | | | | GGCAACATAT | CCTACAGTGA | GCCTGCTTGG | GGCAACAUAU | CCUACAGUGA | GCCUGCUUGG |
| | | | | TG | CTA | GCTATATGTT | UG | CUA | GCUAUAUGUU |
| | | | | [SEQ ID | [SEQ ID | GCCTACAGTG | [SEQ ID | [SEQ ID | GCCUACAGUG |
| | | | | NO: | NO: | ACTATATGGA | NO: | NO: | ACUAUAUGGA |
| | | | | 1628] | 1691] | CCTGCTAAGC | 1821] | 1886] | CCUGCUAAGC |
| | | | | | | TATAGGACTG | | | UAUAGGACUG |
| | | | | | | TAGGCAACAT | | | UAGGCAACAU |
| | | | | | | ATTGCTCAGG | | | AUUGCUCAGG |
| | | | | | | CCGGGACCTC | | | CCGGGACCUC |
| | | | | | | TCTCGCCGCA | | | UCUCGCCGCA |
| | | | | | | CTGAGGGGCA | | | CUGA |
| | | | | | | CTCCA | | | |
| | | | | | | CACCACGGGG | | | GGGGCACUCC |
| | | | | | | GCC | | | ACACCACGGG |
| | | | | | | [SEQ ID | | | GGCC |
| | | | | | | NO: | | | [SEQ ID |
| | | | | | | 1784] | | | NO: |
| | | | | | | | | | 1981] |
| miR- | 3842 | −2.27963 | −0.68707 | AACGTGAGAA | TTCGATCCAT | CATGCAGACT | AACGUGAGAA | UUCGAUCCAU | CAUGCAGACU |
| 1-1 | | | | GGATGGATCG | CCTTCTCAGA | GCCTGCTTGG | GGAUGGAUCG | CCUUCUCAGA | GCCUGCUUGG |
| | | | | TA | GTT | GTTCGATCCA | UA | GUU | GUUCGAUCCA |
| | | | | [SEQ ID | [SEQ ID | TCCTTCTCAG | [SEQ ID | [SEQ ID | UCCUUCUCAG |
| | | | | NO: | NO: | AGTTTATGGA | NO: | NO: | AGUUUAUGGA |
| | | | | 1625] | 1699] | CCTGCTAAGC | 1824] | 1894] | CCUGCUAAGC |
| | | | | | | TAAACGTGAG | | | UAAACGUGAG |
| | | | | | | AAGGATGGAT | | | AAGGAUGGAU |
| | | | | | | CGTACTCAGG | | | CGUACUCAGG |
| | | | | | | CCGGGACCTC | | | CCGGGACCUC |
| | | | | | | TCTCGCCGCA | | | UCUCGCCGCA |
| | | | | | | CTGAGGGGCA | | | CUGAGGGGCA |
| | | | | | | CTCCACACCA | | | CUCCACACCA |
| | | | | | | CGGGGGCC | | | CGGGGGCC |
| | | | | | | [SEQ ID | | | [SEQ ID |
| | | | | | | NO: | | | NO: |
| | | | | | | 1792] | | | 1989] |
| miR- | 2945 | −2.89804 | 0.152222 | TGTAGTAGAA | TGAGCCAAAG | CATGCAGACT | UGUAGUAGAA | UGAGCCAAAG | CAUGCAGACU |
| 1-1_M | | | | GGCTTTGGCT | CCTTCTACCG | GCCTGCTTGG | GGCUUUGGCU | CCUUCUACCG | GCCUGCUUGG |
| | | | | GA | ACA | GTGAGCCAAA | GA | ACA | GUGAGCCAAA |
| | | | | [SEQ ID | [SEQ ID | GCCTTCTACC | [SEQ ID | [SEQ ID | GCCUUCUACC |
| | | | | NO: | NO: | GACATATGGA | NO: | NO: | GACAUAUGGA |
| | | | | 685] | 1633] | CCTGCTAAGC | 1213] | 1828] | CCUGCUAAGC |
| | | | | | | TATGTAGTAG | (Same | | UAUGUAGUAG |
| | | | | | | AAGGCTTTGG | guide | | AAGGCUUUGG |
| | | | | | | CTGACTCAGG | as | | CUGACUCAGG |
| | | | | | | CCGGGACCTC | XD- | | CCGGGACCUC |
| | | | | | | TTCCGCCGCA | 14860) | | UUCCGCCGCA |
| | | | | | | CTGAGGGGCA | | | CUGAGGGGCA |
| | | | | | | CTCCACACCA | | | CUCCACACCA |
| | | | | | | CGGGGGCC | | | CGGGGGCC |
| | | | | | | [SEQ ID | | | [SEQ ID |
| | | | | | | NO: | | | NO: |
| | | | | | | 1711] | | | 1908] |
| miR- | 3341 | −2.70967 | 0.193529 | ATAGACATGA | GACTCAGCAT | CATGCAGACT | AUAGACAUGA | GACUCAGCAU | CAUGCAGACU |
| 1-1_M | | | | GGATGCTGAG | CCTCATGTGA | GCCTGCTTGG | GGAUGCUGAG | CCUCAUGUGA | GCCUGCUUGG |
| | | | | AC | TAT | GGACTCAGCA | AC | UAU | GGACUCAGCA |
| | | | | [SEQ ID | [SEQ ID | TCCTCATGTG | [SEQ ID | [SEQ ID | UCCUCAUGUG |
| | | | | NO: | NO: | ATATTATGGA | NO: | NO: | AUAUUAUGGA |
| | | | | 1617] | 1637] | CCTGCTAAGC | 1813] | 1832] | CCUGCUAAGC |
| | | | | | | TAATAGACAT | | | UAAUAGACAU |
| | | | | | | GAGGATGCTG | | | GAGGAUGCUG |
| | | | | | | AGACCTCAGG | | | AGACCUCAGG |
| | | | | | | CCGGGACCTC | | | CCGGGACCUC |
| | | | | | | TTCCGCCGCA | | | UUCCGCCGCA |
| | | | | | | CTGAGGGGCA | | | CUGAGGGGCA |
| | | | | | | CTCCA | | | CUCCACACCA |
| | | | | | | CACCACGGGG | | | CGGGGGCC |
| | | | | | | GCC | | | [SEQ ID |
| | | | | | | [SEQ ID | | | NO: |
| | | | | | | NO: | | | 1912] |
| | | | | | | 1715] | | | |
| miR- | 1755 | −2.62482 | 0.169485 | TCGGGTTGAA | CTCACTTCAG | CATGCAGACT | UCGGGUUGAA | CUCACUUCAG | CAUGCAGACU |
| 1-1_M | | | | ATCTGAAGTG | ATTTCAACGA | GCCTGCTTGG | AUCUGAAGUG | AUUUCAACGA | GCCUGCUUGG |
| | | | | TG | CGA | GCTCACTTCA | UG | CGA | GCUCACUUCA |
| | | | | [SEQ ID | [SEQ ID | GATTTCAACG | [SEQ ID | [SEQ ID | GAUUUCAACG |
| | | | | NO: | NO: | ACGATATGGA | NO: | NO: | ACGAUAUGGA |
| | | | | 657] | 1645] | CCTGCTAAGC | 1185] | 1840] | CCUGCUAAGC |
| | | | | | | TATCGGGTTG | | | UAUCGGGUUG |
| | | | | | | AAATCTGAAG | | | AAAUCUGAAG |
| | | | | | | TGTGCTCAGG | | | UGUGCUCAGG |
| | | | | | | CCGGGACCTC | | | CCGGGACCUC |
| | | | | | | TTCCGCCGCA | | | UUCCGCCGCA |
| | | | | | | CTGAGGGGCA | | | CUGAGGGGCA |
| | | | | | | CTCCACACCA | | | CUCCACACCA |
| | | | | | | CGGGGGCC | | | CGGGGGCC |
| | | | | | | [SEQ ID | | | [SEQ ID |
| | | | | | | NO: | | | NO: |
| | | | | | | 1723] | | | 1920] |
| miR- | 3302 | −2.57066 | 0.05742 | TTGAACAAGG | CGCAAATCAG | CATGCAGACT | UUGAACAAGG | CGCAAAUCAG | CAUGCAGACU |
| 1-1_M | | | | GGCTGATTTG | CCCCTTGTCG | GCCTGCTTGG | GGCUGAUUUG | CCCCUUGUCG | GCCUGCUUGG |
| | | | | GG | CAA | GCGCAAATCA | GG | CAA | GCGCAAAUCA |
| | | | | [SEQ ID | [SEQ ID | GCCCCTTGTC | [SEQ ID | [SEQ ID | GCCCCUUGUC |
| | | | | NO: | NO: | GCAATATGGA | NO: | NO: | GCAAUAUGGA |
| | | | | 688] | 1647] | CCTGCTAAGC | 1216] | 1842] | CCUGCUAAGC |
| | | | | | | TATTGAACAA | | | UAUUGAACAA |
| | | | | | | GGGGCTGATT | | | GGGGCUGAUU |
| | | | | | | TGGGCTCAGG | | | UGGGCUCAGG |
| | | | | | | CCGGGACCTC | | | CCGGGACCUC |
| | | | | | | TTCCGCCGCA | | | UUCCGCCGCA |
| | | | | | | CTGAGGGGCA | | | CUGAGGGGCA |
| | | | | | | CTCCACACCA | | | CUCCACACCA |
| | | | | | | CGGGGGCC | | | CGGGGGCC |
| | | | | | | [SEQ ID | | | [SEQ ID |
| | | | | | | NO: | | | NO: |
| | | | | | | 1727] | | | 1924] |
| miR- | 3330 | −2.47751 | 0.392579 | TATGCTGAGA | CGACATTATC | CATGCAGACT | UAUGCUGAGA | CGACAUUAUC | CAUGCAGACU |
| 1-1_M | | | | CTGATAATGT | AGTCTCAGGA | GCCTGCTTGG | CUGAUAAUGU | AGUCUCAGGA | GCCUGCUUGG |
| | | | | GG | ATA | GCGACATTAT | GG | AUA | GCGACAUUAU |
| | | | | [SEQ ID | [SEQ ID | CAGTCTCAGG | [SEQ ID | [SEQ ID | CAGUCUCAGG |
| | | | | NO: | NO: | AATATATGGA | NO: | NO: | AAUAUAUGGA |
| | | | | 1614] | 1659] | CCTGCTAAGC | 1811] | 1854] | CCUGCUAAGC |
| | | | | | | TATATGCTGA | | | UAUAUGCUGA |
| | | | | | | GACTGATAAT | | | GACUGAUAAU |
| | | | | | | GTGGCTCAGG | | | GUGGCUCAGG |
| | | | | | | CCGGGACCTC | | | CCGGGACCUC |
| | | | | | | TTCCGCCGCA | | | UUCCGCCGCA |
| | | | | | | CTGAGGGGCA | | | CUGAGGGGCA |
| | | | | | | CTC | | | CUCCACACCA |
| | | | | | | CACACCACGG | | | CGGGGGCC |
| | | | | | | GGGCC | | | [SEQ ID |
| | | | | | | [SEQ ID | | | NO: |
| | | | | | | NO: | | | 1940] |
| | | | | | | 1743] | | | |
| miR- | 2586 | −2.46317 | 0.179187 | TAGATTCAGA | CGAAGTTCTA | CATGCAGACT | UAGAUUCAGA | CGAAGUUCUA | CAUGCAGACU |
| 1-1M | | | | AGTAGAACTT | CTTCTGAACG | GCCTGCTTGG | AGUAGAACUU | CUUCUGAACG | GCCUGCUUGG |
| | | | | GG | CTA | GCGAAGTTCT | GG | CUA | GCGAAGUUCU |
| | | | | [SEQ ID | [SEQ ID | ACTTCTGAAC | [SEQ ID | [SEQ ID | ACUUCUGAAC |
| | | | | NO: | NO: | GCTATATGGA | NO: | NO: | GCUAUAUGGA |
| | | | | 1621] | 1662] | CCTGCTAAGC | 1816] | 1857] | CCUGCUAAGC |
| | | | | | | TATAGATTCA | | | UAUAGAUUCA |
| | | | | | | GAAGTAGAAC | | | GAAGUAGAAC |
| | | | | | | TTGGCTCAGG | | | UUGGCUCAGG |
| | | | | | | CCGGGACCTC | | | CCGGGACCUC |
| | | | | | | TTCCGCCGCA | | | UUCCGCCGCA |
| | | | | | | CTGAGGGGCA | | | CUGAGGGGCA |
| | | | | | | CTCCACACCA | | | CUCCACACCA |
| | | | | | | CGGGGGCC | | | CGGGGGCC |
| | | | | | | [SEQ ID | | | [SEQ ID |
| | | | | | | NO: | | | NO: |
| | | | | | | 1747] | | | 1944] |
| miR- | 3272 | −2.45517 | 0.050153 | AGGACTGTAG | GGAATATGTT | CATGCAGACT | AGGACUGUAG | GGAAUAUGUU | CAUGCAGACU |
| 1-1_M | | | | GCAACATATT | GCCTACAGCG | GCCTGCTTGG | GCAACAUAUU | GCCUACAGCG | GCCUGCUUGG |
| | | | | GC | CCT | GGGAATATGT | GC | CCU | GGGAAUAUGU |
| | | | | [SEQ ID | [SEQ ID | TGCCTACAGC | [SEQ ID | [SEQ ID | UGCCUACAGC |
| | | | | NO: | NO: | GCCTTATGGA | NO: | NO: | GCCUUAUGGA |
| | | | | 1618] | 1663] | CCTGCTAAGC | 1814] | 1858] | CCUGCUAAGC |
| | | | | | | TAAGGACTGT | | | UAAGGACUGU |
| | | | | | | AGGCAACATA | | | AGGCAACAUA |
| | | | | | | TTGCCTCAGG | | | UUGCCUCAGG |
| | | | | | | CCGGGACCTC | | | CCGGGACCUC |
| | | | | | | TTCCGCCGCA | | | UUCCGCCGCA |
| | | | | | | CTGAGGGGCA | | | CUGAGGGGCA |
| | | | | | | CTCCACACCA | | | CUCCACACCA |
| | | | | | | CGGGGGCC | | | CGGGGGCC |
| | | | | | | [SEQ ID | | | [SEQ ID |
| | | | | | | NO: | | | NO: |
| | | | | | | 1748] | | | 1945] |
| miR- | 2943 | −2.45216 | 0.338577 | TAGTAGAAGG | TGTCAGCCAA | CATGCAGACT | UAGUAGAAGG | UGUCAGCCAA | CAUGCAGACU |
| 1-1_M | | | | CTTTGGCTGA | AGCCTTCTCC | GCCTGCTTGG | CUUUGGCUGA | AGCCUUCUCC | GCCUGCUUGG |
| | | | | GA | CTA | GTGTCAGCCA | GA | CUA | GUGUCAGCCA |
| | | | | [SEQ ID | [SEQ ID | AAGCCTTCTC | [SEQ ID | [SEQ ID | AAGCCUUCUC |
| | | | | NO: | NO: | CCTATATGGA | NO: | NO: | CCUAUAUGGA |
| | | | | 683] | 1650] | CCTGCTAAGC | 1211] | 1845] | CCUGCUAAGC |
| | | | | | | TATAGTAGAA | | | UAUAGUAGAA |
| | | | | | | GGCTTTGGCT | | | GGCUUUGGCU |
| | | | | | | GAGACTCAGG | | | GAGACUCAGG |
| | | | | | | CCGGGACCTC | | | CCGGGACCUC |
| | | | | | | TTCCGCCGCA | | | UUCCGCCGCA |
| | | | | | | CTGAGGGGCA | | | CUGAGGGGCA |
| | | | | | | CTCC | | | CUCCACACCA |
| | | | | | | ACACCACGGG | | | CGGGGGCC |
| | | | | | | GGCC | | | [SEQ ID |
| | | | | | | [SEQ ID | | | NO: |
| | | | | | | NO: | | | 1946] |
| | | | | | | 1749] | | | |
| miR- | 3301 | −2.38494 | 0.327128 | TGAACAAGGG | TGCCAAATCA | CATGCAGACT | UGAACAAGGG | UGCCAAAUCA | CAUGCAGACU |
| 1-1_M | | | | GCTGATTTGG | GCCCCTTGCG | GCCTGCTTGG | GCUGAUUUGG | GCCCCUUGCG | GCCUGCUUGG |
| | | | | GA | TCA | GTGCCAAATC | GA | UCA | GUGCCAAAUC |
| | | | | [SEQ ID | [SEQ ID | AGCCCCTTGC | [SEQ ID | [SEQ ID | AGCCCCUUGC |
| | | | | NO: | NO: | GTCATATGGA | NO: | NO: | GUCAUAUGGA |
| | | | | 687] | 1673] | CCTGCTAAGC | 1215] | 1868] | CCUGCUAAGC |
| | | | | | | TATGAACAAG | | | UAUGAACAAG |
| | | | | | | GGGCTGATTT | | | GGGCUGAUUU |
| | | | | | | GGGACTCAGG | | | GGGACUCAGG |
| | | | | | | CCGGGACCTC | | | CCGGGACCUC |
| | | | | | | TTCCGCCGCA | | | UUCCGCCGCA |
| | | | | | | CTGAGGGGCA | | | CUGAGGGGCA |
| | | | | | | CTCCACACCA | | | CUCCACACCA |
| | | | | | | CGGGGGcc | | | CGGGGGCC |
| | | | | | | [SEQ ID | | | [SEQ ID |
| | | | | | | NO: | | | NO: |
| | | | | | | 1770] | | | 1967] |
| miR- | 2602 | −2.37919 | 0.040602 | TTTAGTAGTT | ATTCTATGGA | CATGCAGACT | UUUAGUAGUU | AUUCUAUGGA | CAUGCAGACU |
| 1-1_M | | | | GATCCATAGA | TCAACTACCG | GCCTGCTTGG | GAUCCAUAGA | UCAACUACCG | GCCUGCUUGG |
| | | | | TT | AAA | GATTCTATGG | UU | AAA | GAUUCUAUGG |
| | | | | [SEQ ID | [SEQ ID | ATCAACTACC | [SEQ ID | [SEQ ID | AUCAACUACC |
| | | | | NO: | NO: | GAAATATGGA | NO: | NO: | GAAAUAUGGA |
| | | | | 1616] | 1681] | CCTGCTAAGC | 202] | 1876] | CCUGCUAAGC |
| | | | | | | TATTTAGTAG | (Same | | UAUUUAGUAG |
| | | | | | | TTGATCCATA | guide | | UUGAUCCAUA |
| | | | | | | GATTCTCAGG | as | | GAUUCUCAGG |
| | | | | | | CCGGGACCTC | XD- | | CCGGGACCUC |
| | | | | | | TTCCGCCGCA | 14837) | | UUCCGCCGCA |
| | | | | | | CTGAGGGGCA | | | CUGAGGGGCA |
| | | | | | | CTCCACACCA | | | CUCCACACCA |
| | | | | | | CGGGGGCC | | | CGGGGGCC |
| | | | | | | [SEQ ID | | | [SEQ ID |
| | | | | | | NO: | | | NO: |
| | | | | | | 1772] | | | 1969] |
| miR- | 3302 | −2.68521 | −0.3818 | TTGAACAAGG | CCCAAACCAG | CCCAAAAGAG | UUGAACAAGG | CCCAAACCAG | CCCAAAAGAG |
| 100 | | | | GGCTGATTTG | ACCCTTGCTC | AGAAGATATT | GGCUGAUUUG | ACCCUUGCUC | AGAAGAUAUU |
| | | | | GG | AT | GAGGCCTGTT | GG | AU | GAGGCCUGUU |
| | | | | [SEQ ID | [SEQ ID | GCCACATTGA | [SEQ ID | [SEQ ID | GCCACAUUGA |
| | | | | NO: | NO: | ACAAGGGGCT | NO: | NO: | ACAAGGGGCU |
| | | | | 688] | 1638] | GATTTGGGGT | 1216] | 1833] | GAUUUGGGGU |
| | | | | | | ATTAGTCCGC | | | AUUAGUCCGC |
| | | | | | | CCAAACCAGA | | | CCAAACCAGA |
| | | | | | | CCCTTGCTCA | | | CCCUUGCUCA |
| | | | | | | TTGTGTCTGT | | | UUGUGUCUGU |
| | | | | | | TAGGCAATCT | | | UAGGCAAUCU |
| | | | | | | CACGGACCTG | | | CACGGACCUG |
| | | | | | | GGGC | | | GGGCUUUGCU |
| | | | | | | TTTGCTTATA | | | UAUAUGCC |
| | | | | | | TGCC | | | [SEQ ID |
| | | | | | | [SEQ ID | | | NO: |
| | | | | | | NO: | | | 1913] |
| | | | | | | 1716] | | | |
| miR- | 3043 | −2.67985 | −0.0584 | TTTGGTGCAA | AGCCTGCTTG | CCCAAAAGAG | UUUGGUGCAA | AGCCUGCUUG | CCCAAAAGAG |
| 100 | | | | AACAAACAGG | GTTTGCAACA | AGAAGATATT | AACAAACAGG | GUUUGCAACA | AGAAGAUAUU |
| | | | | CT | AT | GAGGCCTGTT | CU | AU | GAGGCCUGUU |
| | | | | [SEQ ID | [SEQ ID | GCCACATTTG | [SEQ ID | [SEQ ID | GCCACAUUUG |
| | | | | NO: | NO: | GTGCAAAACA | NO: | NO: | GUGCAAAACA |
| | | | | 1615] | 1639] | AACAGGCTGT | 1812] | 1834] | AACAGGCUGU |
| | | | | | | ATTAGTCCGA | | | AUUAGUCCGA |
| | | | | | | GCCTGCTTGG | | | GCCUGCUUGG |
| | | | | | | TTTGCAACAA | | | UUUGCAACAA |
| | | | | | | TTGTGTCTGT | | | UUGUGUCUGU |
| | | | | | | TAGGCAATCT | | | UAGGCAAUCU |
| | | | | | | CACGGACCTG | | | CACGGACCUG |
| | | | | | | GGGCTTTGCT | | | GGGCUUUGCU |
| | | | | | | TATATGCC | | | UAUAUGCC |
| | | | | | | [SEQ ID | | | [SEQ ID |
| | | | | | | NO: | | | NO: |
| | | | | | | 1717] | | | 1914] |
| miR- | 1755 | −2.66915 | −0.04161 | TCGGGTTGAA | CACACTCCAG | CCCAAAAGAG | UCGGGUUGAA | CACACUCCAG | CCCAAAAGAG |
| 100 | | | | ATCTGAAGTG | CTTTCAAACC | AGAAGATATT | AUCUGAAGUG | CUUUCAAACC | AGAAGAUAUU |
| | | | | TG | GT | GAGGCCTGTT | UG | GU | GAGGCCUGUU |
| | | | | [SEQ ID | [SEQ ID | GCCACATCGG | [SEQ ID | [SEQ ID | GCCACAUCGG |
| | | | | NO: | NO: | GTTGAAATCT | NO: | NO: | GUUGAAAUCU |
| | | | | 657] | 1640] | GAAGTGTGGT | 1185] | 1835] | GAAGUGUGGU |
| | | | | | | ATTAGTCCGC | | | AUUAGUCCGC |
| | | | | | | ACACTCCAGC | | | ACACUCCAGC |
| | | | | | | TTTCAAACCG | | | UUUCAAACCG |
| | | | | | | TTGTGTCTGT | | | UUGUGUCUGU |
| | | | | | | TAGGCAATCT | | | UAGGCAAUCU |
| | | | | | | CACGGACCTG | | | CACGGACCUG |
| | | | | | | GGGCTTTGCT | | | GGGCUUUGCU |
| | | | | | | TATATGCC | | | UAUAUGCC |
| | | | | | | [SEQ ID | | | [SEQ ID |
| | | | | | | NO: | | | NO: |
| | | | | | | 1718] | | | 1915] |
| miR- | 3272 | −2.65898 | −0.1606 | AGGACTGTAG | GCAATACGTT | CCCAAAAGAG | AGGACUGUAG | GCAAUACGUU | CCCAAAAGAG |
| 100 | | | | GCAACATATT | TCCTACAATC | AGAAGATATT | GCAACAUAUU | UCCUACAAUC | AGAAGAUAUU |
| | | | | GC | CA | GAGGCCTGTT | GC | CA | GAGGCCUGUU |
| | | | | [SEQ ID | [SEQ ID | GCCACAAGGA | [SEQ ID | [SEQ ID | GCCACAAGGA |
| | | | | NO: | NO: | CTGTAGGCAA | NO: | NO: | CUGUAGGCAA |
| | | | | 1618] | 1641] | CATATTGCGT | 1814] | 1836] | CAUAUUGCGU |
| | | | | | | ATTAGTCCGG | | | AUUAGUCCGG |
| | | | | | | CAATACGTTT | | | CAAUACGUUU |
| | | | | | | CCTACAATCC | | | CCUACAAUCC |
| | | | | | | ATGTGTCTGT | | | AUGUGUCUGU |
| | | | | | | TAGGCAATCT | | | UAGGCAAUCU |
| | | | | | | CACGGACCTG | | | CACGGACCUG |
| | | | | | | GGGC | | | GGGCUUUGCU |
| | | | | | | TTTGCTTATA | | | UAUAUGCC |
| | | | | | | TGCC | | | [SEQ ID |
| | | | | | | [SEQ ID | | | NO: |
| | | | | | | NO: | | | 1916] |
| | | | | | | 1719] | | | |
| miR- | 1578 | −2.43871 | −0.43493 | TGGAATTTCT | ACAGCAATTC | CCCAAAAGAG | UGGAAUUUCU | ACAGCAAUUC | CCCAAAAGAG |
| 100 | | | | CTGAACTGCT | CGAGAAACTC | AGAAGATATT | CUGAACUGCU | CGAGAAACUC | AGAAGAUAUU |
| | | | | GT | CT | GAGGCCTGTT | GU | CU | GAGGCCUGUU |
| | | | | [SEQ ID | [SEQ ID | GCCACATGGA | [SEQ ID | [SEQ ID | GCCACAUGGA |
| | | | | NO: | NO: | ATTTCTCTGA | NO: | NO: | AUUUCUCUGA |
| | | | | 1626] | 1665] | ACTGCTGTGT | 1820] | 1860] | ACUGCUGUGU |
| | | | | | | ATTAGTCCGA | | | AUUAGUCCGA |
| | | | | | | CAGCAATTCC | | | CAGCAAUUCC |
| | | | | | | GAGAAACTCC | | | GAGAAACUCC |
| | | | | | | TTGTGTCTGT | | | UUGUGUCUGU |
| | | | | | | TAGGCAATCT | | | UAGGCAAUCU |
| | | | | | | CACGGACCTG | | | CACGGACCUG |
| | | | | | | GGGCTTTGCT | | | GGGCUUUGCU |
| | | | | | | TATATGCC | | | UAUAUGCC |
| | | | | | | [SEQ ID | | | [SEQ ID |
| | | | | | | NO: | | | NO: |
| | | | | | | 1751] | | | 1948] |
| miR- | 2945 | −2.38747 | −0.10088 | TGTAGTAGAA | TCAGCCCAAG | CCCAAAAGAG | UGUAGUAGAA | UCAGCCCAAG | CCCAAAAGAG |
| 100 | | | | GGCTTTGGCT | ACTTCTAATA | AGAAGATATT | GGCUUUGGCU | ACUUCUAAUA | AGAAGAUAUU |
| | | | | GA | CT | GAGGCCTGTT | GA | CU | GAGGCCUGUU |
| | | | | [SEQ ID | [SEQ ID | GCCACATGTA | [SEQ ID | [SEQ ID | GCCACAUGUA |
| | | | | NO: | NO: | GTAGAAGGCT | NO: | NO: | GUAGAAGGCU |
| | | | | 685] | 1678] | TTGGCTGAGT | 1213] | 1873] | UUGGCUGAGU |
| | | | | | | ATTAGTCCGT | (Same | | AUUAGUCCGU |
| | | | | | | CAGCCCAAGA | guide | | CAGCCCAAGA |
| | | | | | | CTTCTAATAC | as | | CUUCUAAUAC |
| | | | | | | TTGTGTCTGT | XD- | | UUGUGUCUGU |
| | | | | | | TAGGCAATCT | 14860) | | UAGGCAAUCU |
| | | | | | | CACGGACCTG | | | CACGGACCUG |
| | | | | | | GGGCTTTGCT | | | GGGCUUUGCU |
| | | | | | | TATATGCC | | | UAUAUGCC |
| | | | | | | [SEQ ID | | | [SEQ ID |
| | | | | | | NO: | | | NO: |
| | | | | | | 1768] | | | 1965] |
| miR- | 2586 | −2.32164 | −0.18294 | TAGATTCAGA | CCAAGTCCTA | CCCAAAAGAG | UAGAUUCAGA | CCAAGUCCUA | CCCAAAAGAG |
| 100 | | | | AGTAGAACTT | ATTCTGACTC | AGAAGATATT | AGUAGAACUU | AUUCUGACUC | AGAAGAUAUU |
| | | | | GG | TT | GAGGCCTGTT | GG | UU | GAGGCCUGUU |
| | | | | [SEQ ID | [SEQ ID | GCCACATAGA | [SEQ ID | [SEQ ID | GCCACAUAGA |
| | | | | NO: | NO: | TTCAGAAGTA | NO: | NO: | UUCAGAAGUA |
| | | | | 1621] | 1692] | GAACTTGGGT | 1816] | 1887] | GAACUUGGGU |
| | | | | | | ATTAGTCCGC | | | AUUAGUCCGC |
| | | | | | | CAAGTCCTAA | | | CAAGUCCUAA |
| | | | | | | TTCTGACTCT | | | UUCUGACUCU |
| | | | | | | TTGTGTCTGT | | | UUGUGUCUGU |
| | | | | | | TAGGCAATCT | | | UAGGCAAUCU |
| | | | | | | CACGGACCTG | | | CACGGACCUG |
| | | | | | | GGGCTTTGCT | | | GGGCUUUGCU |
| | | | | | | TATATGCC | | | UAUAUGCC |
| | | | | | | [SEQ ID | | | [SEQ ID |
| | | | | | | NO: | | | NO: |
| | | | | | | 1785] | | | 1982] |
| miR- | 3341 | −2.20897 | 0.022563 | ATAGACATGA | GTCTCAACAT | CCCAAAAGAG | AUAGACAUGA | GUCUCAACAU | CCCAAAAGAG |
| 100 | | | | GGATGCTGAG | ACTCATGCCT | AGAAGATATT | GGAUGCUGAG | ACUCAUGCCU | AGAAGAUAUU |
| | | | | AC | AA | GAGGCCTGTT | AC | AA | GAGGCCUGUU |
| | | | | [SEQ ID | [SEQ ID | GCCACAATAG | [SEQ ID | [SEQ ID | GCCACAAUAG |
| | | | | NO: | NO: | ACATGAGGAT | NO: | NO: | ACAUGAGGAU |
| | | | | 1617] | 2008] | GCTGAGACGT | 1813] | 2010] | GCUGAGACGU |
| | | | | | | ATTAGTCCGG | | | AUUAGUCCGG |
| | | | | | | TCTCAACATA | | | UCUCAACAUA |
| | | | | | | CTCATGCCTA | | | CUCAUGCCUA |
| | | | | | | ATGTGTCTGT | | | AUGUGUCUGU |
| | | | | | | TAGGCAATCT | | | UAGGCAAUCU |
| | | | | | | CACGGACCTG | | | CACGGACCUG |
| | | | | | | GGGCTTTGCT | | | GGGCUUUGCU |
| | | | | | | TATATGCC | | | UAUAUGCC |
| | | | | | | [SEQ ID | | | [SEQ ID |
| | | | | | | NO: | | | NO: |
| | | | | | | 2009] | | | 2011] |
| miR- | 893 | −2.15837 | −0.34705 | TTTGTTACTG | CAGAGGCCGA | CCCAAAAGAG | UUUGUUACUG | CAGAGGCCGA | CCCAAAAGAG |
| 100 | | | | TTTCGACCTC | CACAGTACCA | AGAAGATATT | UUUCGACCUC | CACAGUACCA | AGAAGAUAUU |
| | | | | TG | AT | GAGGCCTGTT | UG | AU | GAGGCCUGUU |
| | | | | [SEQ ID | [SEQ ID | GCCACATTTG | [SEQ ID | [SEQ ID | GCCACAUUUG |
| | | | | NO: | NO: | TTACTGTTTC | NO: | NO: | UUACUGUUUC |
| | | | | 2012] | 2013] | GACCTCTGGT | 2015] | 2016] | GACCUCUGGU |
| | | | | | | ATTAGTCCGC | | | AUUAGUCCGC |
| | | | | | | AGAGGCCGAC | | | AGAGGCCGAC |
| | | | | | | ACAGTACCAA | | | ACAGUACCAA |
| | | | | | | TTGTGTCTGT | | | UUGUGUCUGU |
| | | | | | | TAGGCAATCT | | | UAGGCAAUCU |
| | | | | | | CACGGACCTG | | | CACGGACCUG |
| | | | | | | GGGCTTTGCT | | | GGGCUUUGCU |
| | | | | | | TATATGCC | | | UAUAUGCC |
| | | | | | | [SEQ ID | | | [SEQ ID |
| | | | | | | NO: | | | NO: |
| | | | | | | 2014] | | | 2017] |
| miR- | 3330 | −2.15241 | 0.12385 | TATGCTGAGA | CCACATCATC | CCCAAAAGAG | UAUGCUGAGA | CCACAUCAUC | CCCAAAAGAG |
| 100 | | | | CTGATAATGT | CGTCTCAACA | AGAAGATATT | CUGAUAAUGU | CGUCUCAACA | AGAAGAUAUU |
| | | | | GG | TT | GAGGCCTGTT | GG | UU | GAGGCCUGUU |
| | | | | [SEQ ID | [SEQ ID | GCCACATATG | [SEQ ID | [SEQ ID | GCCACAUAUG |
| | | | | NO: | NO: | CTGAGACTGA | NO: | NO: | CUGAGACUGA |
| | | | | 1614] | 2018] | TAATGTGGGT | 1811] | 2020] | UAAUGUGGGU |
| | | | | | | ATTAGTCCGC | | | AUUAGUCCGC |
| | | | | | | CACATCATCC | | | CACAUCAUCC |
| | | | | | | GTCTCAACAT | | | GUCUCAACAU |
| | | | | | | TTGTGTCTGT | | | UUGUGUCUGU |
| | | | | | | TAGGCAATCT | | | UAGGCAAUCU |
| | | | | | | CACGGACCTG | | | CACGGACCUG |
| | | | | | | GGGCTTTGCT | | | GGGCUUUGCU |
| | | | | | | TATATGCC | | | UAUAUGCC |
| | | | | | | [SEQ ID | | | [SEQ ID |
| | | | | | | NO: | | | NO: |
| | | | | | | 2019] | | | 2021] |
| miR- | 3302 | −2.62238 | −0.19177 | TTGAACAAGG | CCCAAACCAG | CCCAAAAGAG | UUGAACAAGG | CCCAAACCAG | CCCAAAAGAG |
| 100M | | | | GGCTGATTTG | ACCCTTGCTC | AGAAGATATT | GGCUGAUUUG | ACCCUUGCUC | AGAAGAUAUU |
| | | | | GG | AT | GATGCCTGTT | GG | AU | GAUGCCUGUU |
| | | | | [SEQ ID | [SEQ ID | GCCACATTGA | [SEQ ID | [SEQ ID | GCCACAUUGA |
| | | | | NO: | NO: | ACAAGGGGCT | NO: | NO: | ACAAGGGGCU |
| | | | | 688] | 1638] | GATTTGGGGT | 1216] | 1833] | GAUUUGGGGU |
| | | | | | | ATTAGTCCGC | | | AUUAGUCCGC |
| | | | | | | CCAAACCAGA | | | CCAAACCAGA |
| | | | | | | CCCTTGCTCA | | | CCCUUGCUCA |
| | | | | | | TTGTGTCTGT | | | UUGUGUCUGU |
| | | | | | | TAGGCTATTC | | | UAGGCUAUUC |
| | | | | | | CACGGACCTG | | | CACGGACCUG |
| | | | | | | GGGCTTTGCT | | | GGGCUUUGCU |
| | | | | | | TATATGCC | | | UAUAUGCC |
| | | | | | | [SEQ ID | | | [SEQ ID |
| | | | | | | NO: | | | NO: |
| | | | | | | 1724] | | | 1921] |
| miR- | 3272 | −2.56927 | −0.01914 | AGGACTGTAG | GCAATACGTT | CCCAAAAGAG | AGGACUGUAG | GCAAUACGUU | CCCAAAAGAG |
| 100_M | | | | GCAACATATT | TCCTACAATC | AGAAGATATT | GCAACAUAUU | UCCUACAAUC | AGAAGAUAUU |
| | | | | GC | CA | GATGCCTGTT | GC | CA | GAUGCCUGUU |
| | | | | [SEQ ID | [SEQ ID | GCCACAAGGA | [SEQ ID | [SEQ ID | GCCACAAGGA |
| | | | | NO: | NO: | CTGTAGGCAA | NO: | NO: | CUGUAGGCAA |
| | | | | 1618] | 1641] | CATATTGCGT | 1814] | 1836] | CAUAUUGCGU |
| | | | | | | ATTAGTCCGG | | | AUUAGUCCGG |
| | | | | | | CAATACGTTT | | | CAAUACGUUU |
| | | | | | | CCTACAATCC | | | CCUACAAUCC |
| | | | | | | ATGTGTCTGT | | | AUGUGUCUGU |
| | | | | | | TAGGCTATTC | | | UAGGCUAUUC |
| | | | | | | CACGGACCTG | | | CACGGACCUG |
| | | | | | | GGGCTTTGCT | | | GGGCUUUGCU |
| | | | | | | TATATGCC | | | UAUAUGCC |
| | | | | | | [SEQ ID | | | [SEQ ID |
| | | | | | | NO: | | | NO: |
| | | | | | | 17291 | | | 1926] |
| miR- | 3133 | −2.49525 | 0.238806 | TATGTCTTGG | CAGTGACTCA | CCCAAAAGAG | UAUGUCUUGG | CAGUGACUCA | CCCAAAAGAG |
| 100_M | | | | CTTGATTCAC | CGCCAAGCCA | AGAAGATATT | CUUGAUUCAC | CGCCAAGCCA | AGAAGAUAUU |
| | | | | TG | TT | GATGCCTGTT | UG | UU | GAUGCCUGUU |
| | | | | [SEQ ID | [SEQ ID | GCCACATATG | [SEQ ID | [SEQ ID | GCCACAUAUG |
| | | | | NO: | NO: | TCTTGGCTTG | NO: | NO: | UCUUGGCUUG |
| | | | | 1624] | 1656] | ATTCACTGGT | 1819] | 1851] | AUUCACUGGU |
| | | | | | | ATTAGTCCGC | | | AUUAGUCCGC |
| | | | | | | AGTGACTCAC | | | AGUGACUCAC |
| | | | | | | GCCAAGCCAT | | | GCCAAGCCAU |
| | | | | | | TTGTGTCTGT | | | UUGUGUCUGU |
| | | | | | | TAGGCTATTC | | | UAGGCUAUUC |
| | | | | | | CACGGACCTG | | | CACGGACCUG |
| | | | | | | GGGCTTTGCT | | | GGGCUUUGCU |
| | | | | | | TATATGCC | | | UAUAUGCC |
| | | | | | | [SEQ ID | | | [SEQ ID |
| | | | | | | NO: | | | NO: |
| | | | | | | 1740] | | | 1937] |
| miR- | 1755 | −2.4723 | −0.07055 | TCGGGTTGAA | CACACTCCAG | CCCAAAAGAG | UCGGGUUGAA | CACACUCCAG | CCCAAAAGAG |
| 100_M | | | | ATCTGAAGTG | CTTTCAAACC | AGAAGATATT | AUCUGAAGUG | CUUUCAAACC | AGAAGAUAUU |
| | | | | TG | GT | GATGCCTGTT | UG | GU | GAUGCCUGUU |
| | | | | [SEQ ID | [SEQ ID | GCCACAT | [SEQ ID | [SEQ ID | GCCACAUC |
| | | | | NO: | NO: | CGGGTTGAAA | NO: | NO: | GGGUUGAAAU |
| | | | | 657] | 1640] | TCTGAAGTGT | 1185] | 1835] | CUGAAGUGUG |
| | | | | | | GGTATTAGTC | | | GUAUUAGUCC |
| | | | | | | CGCACACTCC | | | GCACACUCCA |
| | | | | | | AGCTTTCAAA | | | GCUUUCAAAC |
| | | | | | | CCGTTGTGTC | | | CGUUGUGUCU |
| | | | | | | TGTTAGGCTA | | | GUUAGGCUAU |
| | | | | | | TTCCACGGAC | | | UCCACGGACC |
| | | | | | | CTGGGGCTTT | | | UGGGGCUUUG |
| | | | | | | GCTTATATGC | | | CUUAUAUGCC |
| | | | | | | C | | | [SEQ ID |
| | | | | | | [SEQ ID | | | NO: |
| | | | | | | NO: | | | 1942] |
| | | | | | | 1745] | | | |
| miR- | 1231 | −2.37228 | −0.26919 | TTCACTTTAG | CTGCTACCAG | CCCAAAAGAG | UUCACUUUAG | CUGCUACCAG | CCCAAAAGAG |
| 100_M | | | | CACTGATAGC | GGCTAAAATG | AGAAGATATT | CACUGAUAGC | GGCUAAAAUG | AGAAGAUAUU |
| | | | | AG | AT | GATGCCTGTT | AG | AU | GAUGCCUGUU |
| | | | | [SEQ ID | [SEQ ID | GCCACATTCA | [SEQ ID | [SEQ ID | GCCACAUUCA |
| | | | | NO: | NO: | CTTTAGCACT | NO: | NO: | CUUUAGCACU |
| | | | | 1627] | 1682] | GATAGCAGGT | 1825] | 1877] | GAUAGCAGGU |
| | | | | | | ATTAGTCCGC | | | AUUAGUCCGC |
| | | | | | | TGCTACCAGG | | | UGCUACCAGG |
| | | | | | | GCTAAAATGA | | | GCUAAAAUGA |
| | | | | | | TTGTGTCTGT | | | UUGUGUCUGU |
| | | | | | | TAGGCTATTC | | | UAGGCUAUUC |
| | | | | | | CACGGACCTG | | | CACGGACCUG |
| | | | | | | GGGCTTTGCT | | | GGGCUUUGCU |
| | | | | | | TATATGCC | | | UAUAUGCC |
| | | | | | | [SEQ ID | | | [SEQ ID |
| | | | | | | NO: | | | NO: |
| | | | | | | 1773] | | | 1970] |
| miR- | 3043 | −2.35911 | 0.045827 | TTTGGTGCAA | AGCCTGCTTG | CCCAAAAGAG | UUUGGUGCAA | AGCCUGCUUG | CCCAAAAGAG |
| 100_M | | | | AACAAACAGG | GTTTGCAACA | AGAAGATATT | AACAAACAGG | GUUUGCAACA | AGAAGAUAUU |
| | | | | CT | AT | GATGCCTGTT | CU | AU | GAUGCCUGUU |
| | | | | [SEQ ID | [SEQ ID | GCCACATTTG | [SEQ ID | [SEQ ID | GCCACAUUUG |
| | | | | NO: | NO: | GTGCAAAACA | NO: | NO: | GUGCAAAACA |
| | | | | 1615] | 1639] | AACAGGCTGT | 1812] | 1834] | AACAGGCUGU |
| | | | | | | ATTAGTCCGA | | | AUUAGUCCGA |
| | | | | | | GCCTGCTTGG | | | GCCUGCUUGG |
| | | | | | | TTTGCAACAA | | | UUUGCAACAA |
| | | | | | | TTGTGTCTGT | | | UUGUGUCUGU |
| | | | | | | TAGGCTATTC | | | UAGGCUAUUC |
| | | | | | | CACGGACCTG | | | CACGGACCUG |
| | | | | | | GGGCTTTGCT | | | GGGCUUUGCU |
| | | | | | | TATATGCC | | | UAUAUGCC |
| | | | | | | [SEQ ID | | | [SEQ ID |
| | | | | | | NO: | | | NO: |
| | | | | | | 1776] | | | 1973] |
| miR- | 3301 | −2.30882 | −0.2279 | TGAACAAGGG | TCCCAACTCA | CCCAAAAGAG | UGAACAAGGG | UCCCAACUCA | CCCAAAAGAG |
| 100_M | | | | GCTGATTTGG | TCCCCTTATT | AGAAGATATT | GCUGAUUUGG | UCCCCUUAUU | AGAAGAUAUU |
| | | | | GA | CT | GATGCCTGTT | GA | CU | GAUGCCUGUU |
| | | | | [SEQ ID | [SEQ ID | GCCACATGAA | [SEQ ID | [SEQ ID | GCCACAUGAA |
| | | | | NO: | NO: | CAAGGGGCTG | NO: | NO: | CAAGGGGCUG |
| | | | | 687] | 1695] | ATTTGGGAGT | 1215] | 1890] | AUUUGGGAGU |
| | | | | | | ATTAGTCCGT | | | AUUAGUCCGU |
| | | | | | | CCCAACTCAT | | | CCCAACUCAU |
| | | | | | | CCCCTTA | | | CCCCUUAU |
| | | | | | | TTCTTGTGTC | | | UCUUGUGUCU |
| | | | | | | TGTTAGGCTA | | | GUUAGGCUAU |
| | | | | | | TTCCACGGAC | | | UCCACGGACC |
| | | | | | | CTGGGGCTTT | | | UGGGGCUUUG |
| | | | | | | GCTTATATGC | | | CUUAUAUGCC |
| | | | | | | C | | | [SEQ ID |
| | | | | | | [SEQ ID | | | NO: |
| | | | | | | NO: | | | 1985] |
| | | | | | | 1788] | | | |
| miR- | 2945 | −2.26187 | 0.044364 | TGTAGTAGAA | TCAGCCCAAG | CCCAAAAGAG | UGUAGUAGAA | UCAGCCCAAG | CCCAAAAGAG |
| 100_M | | | | GGCTTTGGCT | ACTTCTAATA | AGAAGATATT | GGCUUUGGCU | ACUUCUAAUA | AGAAGAUAUU |
| | | | | GA | CT | GATGCCTGTT | GA | CU | GAUGCCUGUU |
| | | | | [SEQ ID | [SEQ ID | GCCACATGTA | [SEQ ID | [SEQ ID | GCCACAUGUA |
| | | | | NO: | NO: | GTAGAAGGCT | NO: | NO: | GUAGAAGGCU |
| | | | | 685] | 1678] | TTGGCTGAGT | 1213] | 1873] | UUGGCUGAGU |
| | | | | | | ATTAGTCCGT | (Same | | AUUAGUCCGU |
| | | | | | | CAGCCCAAGA | guide | | CAGCCCAAGA |
| | | | | | | CTTCTAATAC | as | | CUUCUAAUAC |
| | | | | | | TTGTGTCTGT | XD- | | UUGUGUCUGU |
| | | | | | | TAGGCTATTC | 14860) | | UAGGCUAUUC |
| | | | | | | CACGGACCTG | | | CACGGACCUG |
| | | | | | | GGGCTTTGCT | | | GGGCUUUGCU |
| | | | | | | TATATGCC | | | UAUAUGCC |
| | | | | | | [SEQ ID | | | [SEQ ID |
| | | | | | | NO: | | | NO: |
| | | | | | | 1797] | | | 1994] |
| miR- | 1578 | −2.24051 | −0.33444 | TGGAATTTCT | ACAGCAATTC | CCCAAAAGAG | UGGAAUUUCU | ACAGCAAUUC | CCCAAAAGAG |
| 100_M | | | | CTGAACTGCT | CGAGAAACTC | AGAAGATATT | CUGAACUGCU | CGAGAAACUC | AGAAGAUAUU |
| | | | | GT | CT | GATGCCTGTT | GU | CU | GAUGCCUGUU |
| | | | | [SEQ ID | [SEQ ID | GCCACATGGA | [SEQ ID | [SEQ ID | GCCACAUGGA |
| | | | | NO: | NO: | ATTTCTCTGA | NO: | NO: | AUUUCUCUGA |
| | | | | 1626] | 1665] | ACTGCTGTGT | 1820] | 1860] | ACUGCUGUGU |
| | | | | | | ATTAGTCCGA | | | AUUAGUCCGA |
| | | | | | | CAGCAATTCC | | | CAGCAAUUCC |
| | | | | | | GAGAAACTCC | | | GAGAAACUCC |
| | | | | | | TTGTGTCTGT | | | UUGUGUCUGU |
| | | | | | | TAGGCTATTC | | | UAGGCUAUUC |
| | | | | | | CACGGACCTG | | | CACGGACCUG |
| | | | | | | GGGCTTTGCT | | | GGGCUUUGCU |
| | | | | | | TATATGCC | | | UAUAUGCC |
| | | | | | | [SEQ ID | | | [SEQ ID |
| | | | | | | NO: | | | NO: |
| | | | | | | 1808] | | | 2005] |
| miR- | 1580 | −2.12895 | −0.08237 | ACTGGAATTT | AGCAGTCCAG | CCCAAAAGAG | ACUGGAAUUU | AGCAGUCCAG | CCCAAAAGAG |
| 100_M | | | | CTCTGAACTG | CGAAATTACA | AGAAGATATT | CUCUGAACUG | CGAAAUUACA | AGAAGAUAUU |
| | | | | CT | GA | GATGCCTGTT | CU | GA | GAUGCCUGUU |
| | | | | [SEQ ID | [SEQ ID | GCCACAACTG | [SEQ ID | [SEQ ID | GCCACAACUG |
| | | | | NO: | NO: | GAATTTCTCT | NO: | NO: | GAAUUUCUCU |
| | | | | 1622] | 2022] | GAACTGCTGT | 1817] | 2024] | GAACUGCUGU |
| | | | | | | ATTAGTCCGA | | | AUUAGUCCGA |
| | | | | | | GCAGTCCAGC | | | GCAGUCCAGC |
| | | | | | | GAAATTACAG | | | GAAAUUACAG |
| | | | | | | ATGTGTCTGT | | | AUGUGUCUGU |
| | | | | | | TAGGCTATTC | | | UAGGCUAUUC |
| | | | | | | CACGGACCTG | | | CACGGACCUG |
| | | | | | | GGGCTTTGCT | | | GGGCUUUGCU |
| | | | | | | TATATGCC | | | UAUAUGCC |
| | | | | | | [SEQ ID | | | [SEQ ID |
| | | | | | | NO: | | | NO: |
| | | | | | | 2023] | | | 2025] |
| miR- | 3332 | −2.50104 | −0.209 | AGGATGCTGA | ACATTATCAG | GGCTACAGAG | AGGAUGCUGA | ACAUUAUCAG | GGCUACAGAG |
| 122 | | | | GACTGATAAT | TATCAGCATA | TTTCCTTAGC | GACUGAUAAU | UAUCAGCAUA | UUUCCUUAGC |
| | | | | GT | AT | AGAGCTGAGG | GU | AU | AGAGCUGAGG |
| | | | | [SEQ ID | [SEQ ID | ATGCTGAGAC | [SEQ ID | [SEQ ID | AUGCUGAGAC |
| | | | | NO: | NO: | TGATAATGTT | NO: | NO: | UGAUAAUGUU |
| | | | | 1623] | 1655] | GTCTAAACTA | 1818] | 1850] | GUCUAAACUA |
| | | | | | | TACATTATCA | | | UACAUUAUCA |
| | | | | | | GTATCAGCAT | | | GUAUCAGCAU |
| | | | | | | AATTAGCTAC | | | AAUUAGCUAC |
| | | | | | | TGCTAGGCAA | | | UGCUAGGCAA |
| | | | | | | TCCTTCCCTC | | | UCCUUCCCUC |
| | | | | | | GATAAATGTC | | | GAUAAAUGUC |
| | | | | | | TTGGCATCGT | | | UUGGCAUCGU |
| | | | | | | TTGCTTTG | | | UUGCUUUG |
| | | | | | | [SEQ ID | | | [SEQ ID |
| | | | | | | NO: | | | NO: |
| | | | | | | 1739] | | | 1936] |
| miR- | 3341 | −2.4857 | 0.187025 | ATAGACATGA | GTCTCAGCAT | GGCTACAGAG | AUAGACAUGA | GUCUCAGCAU | GGCUACAGAG |
| 122 | | | | GGATGCTGAG | CATCATGTCG | TTTCCTTAGC | GGAUGCUGAG | CAUCAUGUCG | UUUCCUUAGC |
| | | | | AC | CT | AGAGCTGATA | AC | CU | AGAGCUGAUA |
| | | | | [SEQ ID | [SEQ ID | GACATGAGGA | [SEQ ID | [SEQ ID | GACAUGAGGA |
| | | | | NO: | NO: | TGCTGAGACT | NO: | NO: | UGCUGAGACU |
| | | | | 1617] | 1657] | GTCTAAACTA | 1813] | 1852] | GUCUAAACUA |
| | | | | | | TGTCTCAGCA | | | UGUCUCAGCA |
| | | | | | | TCATCATGTC | | | UCAUCAUGUC |
| | | | | | | GCTTAGCTAC | | | GCUUAGCUAC |
| | | | | | | TGCTAGGCAA | | | UGCUAGGCAA |
| | | | | | | TCCTTCCCTC | | | UCCUUCCCUC |
| | | | | | | GATAAATGTC | | | GAUAAAUGUC |
| | | | | | | TTGGCATCGT | | | UUGGCAUCGU |
| | | | | | | TTGCTTTG | | | UUGCUUUG |
| | | | | | | [SEQ ID | | | [SEQ ID |
| | | | | | | NO: | | | NO: |
| | | | | | | 1741] | | | 1938] |
| miR- | 1755 | −2.42198 | 0.034447 | TCGGGTTGAA | CACACTTCAG | GGCTACAGAG | UCGGGUUGAA | CACACUUCAG | GGCUACAGAG |
| 122 | | | | ATCTGAAGTG | ACTTCAACCA | TTTCCTTAGC | AUCUGAAGUG | ACUUCAACCA | UUUCCUUAGC |
| | | | | TG | TA | AGAGCTGTCG | UG | UA | AGAGCUGUCG |
| | | | | [SEQ ID | [SEQ ID | GGTTGAAATC | [SEQ ID | [SEQ ID | GGUUGAAAUC |
| | | | | NO: | NO: | TGAAGTGTGT | NO: | NO: | UGAAGUGUGU |
| | | | | 657] | 1646] | GTCTAAACTA | 1185] | 1841] | GUCUAAACUA |
| | | | | | | TCACACTTCA | | | UCACACUUCA |
| | | | | | | GACTTCAACC | | | GACUUCAACC |
| | | | | | | ATATAGCTAC | | | AUAUAGCUAC |
| | | | | | | TGCTAGGCAA | | | UGCUAGGCAA |
| | | | | | | TCCTTCCCTC | | | UCCUUCCCUC |
| | | | | | | GATAAATGTC | | | GAUAAAUGUC |
| | | | | | | TTGGCATCGT | | | UUGGCAUCGU |
| | | | | | | TTGCTTTG | | | UUGCUUUG |
| | | | | | | [SEQ ID | | | [SEQ ID |
| | | | | | | NO: | | | NO: |
| | | | | | | 1760] | | | 1957] |
| miR- | 2586 | −2.35707 | 0.153236 | TAGATTCAGA | CCAAGTTCTA | GGCTACAGAG | UAGAUUCAGA | CCAAGUUCUA | GGCUACAGAG |
| 122 | | | | AGTAGAACTT | CCTCTGAATA | TTTCCTTAGC | AGUAGAACUU | CCUCUGAAUA | UUUCCUUAGC |
| | | | | GG | GA | AGAGCTGTAG | GG | GA | AGAGCUGUAG |
| | | | | [SEQ ID | [SEQ ID | ATTCAGAAGT | [SEQ ID | [SEQ ID | AUUCAGAAGU |
| | | | | NO: | NO: | AGAACTTGGT | NO: | NO: | AGAACUUGGU |
| | | | | 1621] | 1685] | GTCTAAACTA | 1816] | 1880] | GUCUAAACUA |
| | | | | | | TCCAAGTTCT | | | UCCAAGUUCU |
| | | | | | | ACCTCTGAAT | | | ACCUCUGAAU |
| | | | | | | AGATAGCTAC | | | AGAUAGCUAC |
| | | | | | | TGCTAGGCAA | | | UGCUAGGCAA |
| | | | | | | TCCTTCCCTC | | | UCCUUCCCUC |
| | | | | | | GATAAATGTC | | | GAUAAAUGUC |
| | | | | | | TTGGCATCGT | | | UUGGCAUCGU |
| | | | | | | TTGCTTTG | | | UUGCUUUG |
| | | | | | | [SEQ ID | | | [SEQ ID |
| | | | | | | NO: | | | NO: |
| | | | | | | 1777] | | | 1974] |
| miR- | 3273 | −2.30907 | −0.11515 | TAGGACTGTA | CAATATGTTG | GGCTACAGAG | UAGGACUGUA | CAAUAUGUUG | GGCUACAGAG |
| 122 | | | | GGCAACATAT | CATACAGTCA | TTTCCTTAGC | GGCAACAUAU | CAUACAGUCA | UUUCCUUAGC |
| | | | | TG | GA | AGAGCTGTAG | UG | GA | AGAGCUGUAG |
| | | | | [SEQ ID | [SEQ ID | GACTGTAGGC | [SEQ ID | [SEQ ID | GACUGUAGGC |
| | | | | NO: | NO: | AACATATTGT | NO: | NO: | AACAUAUUGU |
| | | | | 1628] | 1694] | GTCTAAACTA | 1821] | 1889] | GUCUAAACUA |
| | | | | | | TCAATATGTT | | | UCAAUAUGUU |
| | | | | | | GCATACAGTC | | | GCAUACAGUC |
| | | | | | | AGATAGCTAC | | | AGAUAGCUAC |
| | | | | | | TGCTAGGCAA | | | UGCUAGGCAA |
| | | | | | | TCCTTCCCTC | | | UCCUUCCCUC |
| | | | | | | GATAAATGTC | | | GAUAAAUGUC |
| | | | | | | TTGGCATCGT | | | UUGGCAUCGU |
| | | | | | | TTGCTTTG | | | UUGCUUUG |
| | | | | | | [SEQ ID | | | [SEQ ID |
| | | | | | | NO: | | | NO: |
| | | | | | | 1787] | | | 1984] |
| miR- | 1162 | −2.2647 | −0.33024 | AACTGTACCA | CAGACTTTGT | GGCTACAGAG | AACUGUACCA | CAGACUUUGU | GGCUACAGAG |
| 122 | | | | CAACAAAGTC | TATGGTACAT | TTTCCTTAGC | CAACAAAGUC | UAUGGUACAU | UUUCCUUAGC |
| | | | | TG | GT | AGAGCTGAAC | UG | GU | AGAGCUGAAC |
| | | | | [SEQ ID | [SEQ ID | TGTACCACAA | [SEQ ID | [SEQ ID | UGUACCACAA |
| | | | | NO: | NO: | CAAAGTCTGT | NO: | NO: | CAAAGUCUGU |
| | | | | 652] | 1701] | GTCTAAACTA | 1180] | 1896] | GUCUAAACUA |
| | | | | | | TCAGACTTTG | | | UCAGACUUUG |
| | | | | | | TTATGGTACA | | | UUAUGGUACA |
| | | | | | | TGTTAGCTAC | | | UGUUAGCUAC |
| | | | | | | TGCTAGGCAA | | | UGCUAGGCAA |
| | | | | | | TCCTTCCCTC | | | UCCUUCCCUC |
| | | | | | | GATAAATGTC | | | GAUAAAUGUC |
| | | | | | | TTGGCATCGT | | | UUGGCAUCGU |
| | | | | | | TTGCTTTG | | | UUGCUUUG |
| | | | | | | [SEQ ID | | | [SEQ ID |
| | | | | | | NO: | | | NO: |
| | | | | | | 1794] | | | 1991] |
| miR- | 3301 | −2.1436 | 0.009402 | TGAACAAGGG | TCCCAAATCA | GGCTACAGAG | UGAACAAGGG | UCCCAAAUCA | GGCUACAGAG |
| 122 | | | | GCTGATTTGG | GACCCTTGTG | TTTCCTTAGC | GCUGAUUUGG | GACCCUUGUG | UUUCCUUAGC |
| | | | | GA | AA | AGAGCTGTGA | GA | AA | AGAGCUGUGA |
| | | | | [SEQ ID | [SEQ ID | ACAAGGGGCT | [SEQ ID | [SEQ ID | ACAAGGGGCU |
| | | | | NO: | NO: | GATTTGGGAT | NO: | NO: | GAUUUGGGAU |
| | | | | 687] | 1702] | GTCTAAACTA | 1215] | 1897] | GUCUAAACUA |
| | | | | | | TTCCCAAATC | | | UUCCCAAAUC |
| | | | | | | AGACCCTTGT | | | AGACCCUUGU |
| | | | | | | GAATAGCTAC | | | GAAUAGCUAC |
| | | | | | | TGCTAGGCAA | | | UGCUAGGCAA |
| | | | | | | TCCTTCCCTC | | | UCCUUCCCUC |
| | | | | | | GATAAATGTC | | | GAUAAAUGUC |
| | | | | | | TTGGCATCGT | | | UUGGCAUCGU |
| | | | | | | TTGCTTTG | | | UUGCUUUG |
| | | | | | | [SEQ ID | | | [SEQ ID |
| | | | | | | NO: | | | NO: |
| | | | | | | 2026] | | | 2027] |
| miR- | 3330 | −2.06194 | 0.224544 | TATGCTGAGA | CCACATTATC | GGCTACAGAG | UAUGCUGAGA | CCACAUUAUC | GGCUACAGAG |
| 122 | | | | CTGATAATGT | AATCTCAGCC | TTTCCTTAGC | CUGAUAAUGU | AAUCUCAGCC | UUUCCUUAGC |
| | | | | GG | GA | AGAGCTGTAT | GG | GA | AGAGCUGUAU |
| | | | | [SEQ ID | [SEQ ID | GCTGAGACTG | [SEQ ID | [SEQ ID | GCUGAGACUG |
| | | | | NO: | NO: | ATAATGTGGT | NO: | NO: | AUAAUGUGGU |
| | | | | 1614] | 2028] | GTCTAAACTA | 1811] | 2030] | GUCUAAACUA |
| | | | | | | TCCACATTAT | | | UCCACAUUAU |
| | | | | | | CAATCTCAGC | | | CAAUCUCAGC |
| | | | | | | CGATAGCTAC | | | CGAUAGCUAC |
| | | | | | | TGCTAGGCAA | | | UGCUAGGCAA |
| | | | | | | TCCTTCCCTC | | | UCCUUCCCUC |
| | | | | | | GATAAATGTC | | | GAUAAAUGUC |
| | | | | | | TTGGCATCGT | | | UUGGCAUCGU |
| | | | | | | TTGCTTTG | | | UUGCUUUG |
| | | | | | | [SEQ ID | | | [SEQ ID |
| | | | | | | NO: | | | NO: |
| | | | | | | 2029] | | | 2031] |
| miR- | 3272 | −2.04615 | −0.54779 | AGGACTGTAG | GCAATATGTT | GGCTACAGAG | AGGACUGUAG | GCAAUAUGUU | GGCUACAGAG |
| 122 | | | | GCAACATATT | GACTACAGTA | TTTCCTTAGC | GCAACAUAUU | GACUACAGUA | UUUCCUUAGC |
| | | | | GC | AT | AGAGCTGAGG | GC | AU | AGAGCUGAGG |
| | | | | [SEQ ID | [SEQ ID | ACTGTAGGCA | [SEQ ID | [SEQ ID | ACUGUAGGCA |
| | | | | NO: | NO: | ACATATTGCT | NO: | NO: | ACAUAUUGCU |
| | | | | 1618] | 2032] | GTCTAAACTA | 1814] | 2034] | GUCUAAACUA |
| | | | | | | TGCAATATGT | | | UGCAAUAUGU |
| | | | | | | TGACTACAGT | | | UGACUACAGU |
| | | | | | | AATTAGCTAC | | | AAUUAGCUAC |
| | | | | | | TGCTAGGCAA | | | UGCUAGGCAA |
| | | | | | | TCCTTCCCTC | | | UCCUUCCCUC |
| | | | | | | GATAAATGTC | | | GAUAAAUGUC |
| | | | | | | TTGGCATCGT | | | UUGGCAUCGU |
| | | | | | | TTGCTTTG | | | UUGCUUUG |
| | | | | | | [SEQ ID | | | [SEQ ID |
| | | | | | | NO: | | | NO: |
| | | | | | | 2033] | | | 2261 |
| miR- | 3133 | −2.03169 | 0.05703 | TATGTCTTGG | CAGTGAATCA | GGCTACAGAG | UAUGUCUUGG | CAGUGAAUCA | GGCUACAGAG |
| 122 | | | | CTTGATTCAC | AACCAAGACC | TTTCCTTAGC | CUUGAUUCAC | AACCAAGACC | UUUCCUUAGC |
| | | | | TG | GA | AGAGCTGTAT | UG | GA | AGAGCUGUAU |
| | | | | [SEQ ID | [SEQ ID | GTCTTGGCTT | [SEQ ID | [SEQ ID | GUCUUGGCUU |
| | | | | NO: | NO: | GATTCACTGT | NO: | NO: | GAUUCACUGU |
| | | | | 1624] | 1666] | GTCTAAACTA | 1819] | 1861] | GUCUAAACUA |
| | | | | | | TCAGTGAATC | | | UCAGUGAAUC |
| | | | | | | AAACCAAGAC | | | AAACCAAGAC |
| | | | | | | CGATAGCTAC | | | CGAUAGCUAC |
| | | | | | | TGCTAGGCAA | | | UGCUAGGCAA |
| | | | | | | TCCTTCCCTC | | | UCCUUCCCUC |
| | | | | | | GATAAATGTC | | | GAUAAAUGUC |
| | | | | | | TTGGCATCGT | | | UUGGCAUCGU |
| | | | | | | TTGCTTTG | | | UUGCUUUG |
| | | | | | | [SEQ ID | | | [SEQ ID |
| | | | | | | NO: | | | NO: |
| | | | | | | 2262 | | | 2263 |
| miR- | 1755 | −2.60043 | −0.03541 | TCGGGTTGAA | CACACTTCAG | GGCTACAGAG | UCGGGUUGAA | CACACUUCAG | GGCUACAGAG |
| 122_M | | | | ATCTGAAGTG | ACTTCAACCA | TTTGCTTAGC | AUCUGAAGUG | ACUUCAACCA | UUUGCUUAGC |
| | | | | TG | TA | AGAGCTGTCG | UG | UA | AGAGCUGUCG |
| | | | | [SEQ ID | [SEQ ID | GGTTGAAATC | [SEQ ID | [SEQ ID | GGUUGAAAUC |
| | | | | NO: | NO: | TGAAGTGTGT | NO: | NO: | UGAAGUGUGU |
| | | | | 657] | 1646] | GTCTAAACTA | 1185] | 1841] | GUCUAAACUA |
| | | | | | | TCACACTTCA | | | UCACACUUCA |
| | | | | | | GACTTCAACC | | | GACUUCAACC |
| | | | | | | ATATAGCTAC | | | AUAUAGCUAC |
| | | | | | | TGCTAGGCCA | | | UGCUAGGCCA |
| | | | | | | TCCTTCCCTC | | | UCCUUCCCUC |
| | | | | | | GATAAATGTC | | | GAUAAAUGUC |
| | | | | | | TTGGCATCGT | | | UUGGCAUCGU |
| | | | | | | TTGCTTTG | | | UUGCUUUG |
| | | | | | | [SEQ ID | | | [SEQ ID |
| | | | | | | NO: | | | NO: |
| | | | | | | 1725] | | | 1922] |
| miR- | 3133 | −2.43848 | 0.197681 | TATGTCTTGG | CAGTGAATCA | GGCTACAGAG | UAUGUCUUGG | CAGUGAAUCA | GGCUACAGAG |
| 122_M | | | | CTTGATTCAC | AACCAAGACC | TTTGCTTAGC | CUUGAUUCAC | AACCAAGACC | UUUGCUUAGC |
| | | | | TG | GA | AGAGCTGTAT | UG | GA | AGAGCUGUAU |
| | | | | [SEQ ID | [SEQ ID | GTCTTGGCTT | [SEQ ID | [SEQ ID | GUCUUGGCUU |
| | | | | NO: | NO: | GATTCACTGT | NO: | NO: | GAUUCACUGU |
| | | | | 1624] | 1666] | GTCTAAACTA | 1819] | 1861] | GUCUAAACUA |
| | | | | | | TCAGTGAATC | | | UCAGUGAAUC |
| | | | | | | AAACCAAGAC | | | AAACCAAGAC |
| | | | | | | CGATAGCTAC | | | CGAUAGCUAC |
| | | | | | | TGCTAGGCCA | | | UGCUAGGCCA |
| | | | | | | TCCTTCCCTC | | | UCCUUCCCUC |
| | | | | | | GATAAATGTC | | | GAUAAAUGUC |
| | | | | | | TTGGCATCGT | | | UUGGCAUCGU |
| | | | | | | TTGCTTTG | | | UUGCUUUG |
| | | | | | | [SEQ ID | | | [SEQ ID |
| | | | | | | NO: | | | NO: |
| | | | | | | 1752] | | | 1949] |
| miR- | 3302 | −2.40308 | −0.14782 | TTGAACAAGG | CCCAAATCAG | GGCTACAGAG | UUGAACAAGG | CCCAAAUCAG | GGCUACAGAG |
| 122_M | | | | GGCTGATTTG | CACCTTGTTA | TTTGCTTAGC | GGCUGAUUUG | CACCUUGUUA | UUUGCUUAGC |
| | | | | GG | CA | AGAGCTGTTG | GG | CA | AGAGCUGUUG |
| | | | | [SEQ ID | [SEQ ID | AACAAGGGGC | [SEQ ID | [SEQ ID | AACAAGGGGC |
| | | | | NO: | NO: | TGATTTGG | NO: | NO: | UGAUUUGGG |
| | | | | 688] | 1675] | GTGTCTAAAC | 1216] | 1870] | UGUCUAAACU |
| | | | | | | TATCCCAAAT | | | AUCCCAAAUC |
| | | | | | | CAGCACCTTG | | | AGCACCUUGU |
| | | | | | | TTACATAGCT | | | UACAUAGCUA |
| | | | | | | ACTGCTAGGC | | | CUGCUAGGCC |
| | | | | | | CATCCTTCCC | | | AUCCUUCCCU |
| | | | | | | TCGATAAATG | | | CGAUAAAUGU |
| | | | | | | TCTTGGCATC | | | CUUGGCAUCG |
| | | | | | | GTTTGCTT | | | UUUGCUUUG |
| | | | | | | TG | | | [SEQ ID |
| | | | | | | [SEQ ID | | | NO: |
| | | | | | | NO: | | | 1962] |
| | | | | | | 1765] | | | |
| miR- | 3301 | −2.26423 | 0.053866 | TGAACAAGGG | TCCCAAATCA | GGCTACAGAG | UGAACAAGGG | UCCCAAAUCA | GGCUACAGAG |
| 122_M | | | | GCTGATTTGG | GACCCTTGTG | TTTGCTTAGC | GCUGAUUUGG | GACCCUUGUG | UUUGCUUAGC |
| | | | | GA | AA | AGAGCTGTGA | GA | AA | AGAGCUGUGA |
| | | | | [SEQ ID | [SEQ ID | ACAAGGGGCT | [SEQ ID | [SEQ ID | ACAAGGGGCU |
| | | | | NO: | NO: | GATTTGGGAT | NO: | NO: | GAUUUGGGAU |
| | | | | 687] | 1702] | GTCTAAACTA | 1215] | 1897] | GUCUAAACUA |
| | | | | | | TTCCCAAATC | | | UUCCCAAAUC |
| | | | | | | AGACCCTTGT | | | AGACCCUUGU |
| | | | | | | GAATAGCTAC | | | GAAUAGCUAC |
| | | | | | | TGCTAGGCCA | | | UGCUAGGCCA |
| | | | | | | TCCTTCCCTC | | | UCCUUCCCUC |
| | | | | | | GATAAATGTC | | | GAUAAAUGUC |
| | | | | | | TTGGCATCGT | | | UUGGCAUCGU |
| | | | | | | TTGCTTTG | | | UUGCUUUG |
| | | | | | | [SEQ ID | | | [SEQ ID |
| | | | | | | NO: | | | NO: |
| | | | | | | 1795] | | | 1992] |
| miR- | 3132 | −2.24518 | 0.049515 | ATGTCTTGGC | CCAGTGAATC | GGCTACAGAG | AUGUCUUGGC | CCAGUGAAUC | GGCUACAGAG |
| 122M | | | | TTGATTCACT | ACGCCAAGAA | TTTGCTTAGC | UUGAUUCACU | ACGCCAAGAA | UUUGCUUAGC |
| | | | | GG | CT | AGAGCTGATG | GG | CU | AGAGCUGAUG |
| | | | | [SEQ ID | [SEQ ID | TCTTGGCTTG | [SEQ ID | [SEQ ID | UCUUGGCUUG |
| | | | | NO: | NO: | ATTCACTGGT | NO: | NO: | AUUCACUGGU |
| | | | | 1631] | 1707] | GTCTAAACTA | 1826] | 1904] | GUCUAAACUA |
| | | | | | | TCCAGTGAAT | | | UCCAGUGAAU |
| | | | | | | CACGCCAAGA | | | CACGCCAAGA |
| | | | | | | ACTTAGCTAC | | | ACUUAGCUAC |
| | | | | | | TGCTAGGCCA | | | UGCUAGGCCA |
| | | | | | | TCCTTCCCTC | | | UCCUUCCCUC |
| | | | | | | GATAAATGTC | | | GAUAAAUGUC |
| | | | | | | TTGGCATCGT | | | UUGGCAUCGU |
| | | | | | | TTGCTTTG | | | UUGCUUUG |
| | | | | | | [SEQ ID | | | [SEQ ID |
| | | | | | | NO: | | | NO: |
| | | | | | | 1804] | | | 2001] |
| miR- | 3341 | −2.10774 | 0.117999 | ATAGACATGA | GTCTCAGCAT | GGCTACAGAG | AUAGACAUGA | GUCUCAGCAU | GGCUACAGAG |
| 122_M | | | | GGATGCTGAG | CATCATGTCG | TTTGCTTAGC | GGAUGCUGAG | CAUCAUGUCG | UUUGCUUAGC |
| | | | | AC | CT | AGAGCTGATA | AC | CU | AGAGCUGAUA |
| | | | | [SEQ ID | [SEQ ID | GACATGAGGA | [SEQ ID | [SEQ ID | GACAUGAGGA |
| | | | | NO: | NO: | TGCTGAGACT | NO: | NO: | UGCUGAGACU |
| | | | | 1617] | 1657] | GTCTAAACTA | 1813] | 1852] | GUCUAAACUA |
| | | | | | | TGTCTCAGCA | | | UGUCUCAGCA |
| | | | | | | TCAT | | | UCAU |
| | | | | | | CATGTCGCTT | | | CAUGUCGCUU |
| | | | | | | AGCTACTGCT | | | AGCUACUGCU |
| | | | | | | AGGCCATCCT | | | AGGCCAUCCU |
| | | | | | | TCCCTCGATA | | | UCCCUCGAUA |
| | | | | | | AATGTCTTGG | | | AAUGUCUUGG |
| | | | | | | CATCGTTTGC | | | CAUCGUUUGC |
| | | | | | | TTTG | | | UUUG |
| | | | | | | [SEQ ID | | | [SEQ ID |
| | | | | | | NO: | | | NO: |
| | | | | | | 2264] | | | 2265] |
| miR- | 3332 | −2.06545 | −0.17324 | AGGATGCTGA | ACATTATCAG | GGCTACAGAG | AGGAUGCUGA | ACAUUAUCAG | GGCUACAGAG |
| 122M | | | | GACTGATAAT | TATCAGCATA | TTTGCTTAGC | GACUGAUAAU | UAUCAGCAUA | UUUGCUUAGC |
| | | | | GT | AT | AGAGCTGAGG | GU | AU | AGAGCUGAGG |
| | | | | [SEQ ID | [SEQ ID | ATGCTGAGAC | [SEQ ID | [SEQ ID | AUGCUGAGAC |
| | | | | NO: | NO: | TGATAATGTT | NO: | NO: | UGAUAAUGUU |
| | | | | 1623] | 1655] | GTCTAAACTA | 1818] | 1850] | GUCUAAACUA |
| | | | | | | TACATTATCA | | | UACAUUAUCA |
| | | | | | | GTATCAGCAT | | | GUAUCAGCAU |
| | | | | | | AATTAGCTAC | | | AAUUAGCUAC |
| | | | | | | TGCTAGGCCA | | | UGCUAGGCCA |
| | | | | | | TCCTTCCCTC | | | UCCUUCCCUC |
| | | | | | | GATAAATGTC | | | GAUAAAUGUC |
| | | | | | | TTGGCATCGT | | | UUGGCAUCGU |
| | | | | | | TTGCTTTG | | | UUGCUUUG |
| | | | | | | [SEQ ID | | | [SEQ ID |
| | | | | | | NO: | | | NO: |
| | | | | | | 2266] | | | 2267] |
| miR- | 3272 | −2.0434 | −0.02715 | AGGACTGTAG | GCAATATGTT | GGCTACAGAG | AGGACUGUAG | GCAAUAUGUU | GGCUACAGAG |
| 122M | | | | GCAACATATT | GACTACAGTA | TTTGCTTAGC | GCAACAUAUU | GACUACAGUA | UUUGCUUAGC |
| | | | | GC | AT | AGAGCTGAGG | GC | AU | AGAGCUGAGG |
| | | | | [SEQ ID | [SEQ ID | ACTGTAGGCA | [SEQ ID | [SEQ ID | ACUGUAGGCA |
| | | | | NO: | NO: | ACATATTGCT | NO: | NO: | ACAUAUUGCU |
| | | | | 1618] | 2032] | GTCTAAACTA | 1814] | 2034] | GUCUAAACUA |
| | | | | | | TGCAATATGT | | | UGCAAUAUGU |
| | | | | | | TGACTACAGT | | | UGACUACAGU |
| | | | | | | AATTAGCTAC | | | AAUUAGCUAC |
| | | | | | | TGCTAGGCCA | | | UGCUAGGCCA |
| | | | | | | TCCTTCCCTC | | | UCCUUCCCUC |
| | | | | | | GATAAATGTC | | | GAUAAAUGUC |
| | | | | | | TTGGCATCGT | | | UUGGCAUCGU |
| | | | | | | TTGCTTTG | | | UUGCUUUG |
| | | | | | | [SEQ ID | | | [SEQ ID |
| | | | | | | NO: | | | NO: |
| | | | | | | 2268] | | | 2035] |
| miR- | 3338 | −1.99732 | −0.07815 | TACATGAGGA | TCAGTCTCAG | GGCTACAGAG | UACAUGAGGA | UCAGUCUCAG | GGCUACAGAG |
| 122_M | | | | TGCTGAGACT | CCTCCTCATT | TTTGCTTAGC | UGCUGAGACU | CCUCCUCAUU | UUUGCUUAGC |
| | | | | GA | GA | AGAGCTGTAC | GA | GA | AGAGCUGUAC |
| | | | | [SEQ ID | [SEQ ID | ATGAGGATGC | [SEQ ID | [SEQ ID | AUGAGGAUGC |
| | | | | NO: | NO: | TGAGACTGAT | NO: | NO: | UGAGACUGAU |
| | | | | 1620] | 2036] | GTCTAAACTA | 314] | 2038] | GUCUAAACUA |
| | | | | | | TTCAGTCTCA | (Same | | UUCAGUCUCA |
| | | | | | | GCCTCCTCAT | guide | | GCCUCCUCAU |
| | | | | | | TGATAGC | as | | UGAUAGC |
| | | | | | | TACTGCTAGG | XD- | | UACUGCUAGG |
| | | | | | | CCATCCTTCC | 14893) | | CCAUCCUUCC |
| | | | | | | CTCGATAAAT | | | CUCGAUAAAU |
| | | | | | | GTCTTGGCAT | | | GUCUUGGCAU |
| | | | | | | CGTTTGCTTT | | | CGUUUGCUUU |
| | | | | | | G | | | G |
| | | | | | | [SEQ ID | | | [SEQ ID |
| | | | | | | NO: | | | NO: |
| | | | | | | 2037] | | | 2039] |
| miR- | 1162 | −1.99443 | −0.12785 | AACTGTACCA | CAGACTTTGT | GGCTACAGAG | AACUGUACCA | CAGACUUUGU | GGCUACAGAG |
| 122M | | | | CAACAAAGTC | TATGGTACAT | TTTGCTTAGC | CAACAAAGUC | UAUGGUACAU | UUUGCUUAGC |
| | | | | TG | GT | AGAGCTGAAC | UG | GU | AGAGCUGAAC |
| | | | | [SEQ ID | [SEQ ID | TGTACCACAA | [SEQ ID | [SEQ ID | UGUACCACAA |
| | | | | NO: | NO: | CAAAGTCTGT | NO: | NO: | CAAAGUCUGU |
| | | | | 652] | 1701] | GTCTAAACTA | 1180] | 1896] | GUCUAAACUA |
| | | | | | | TCAGACTTTG | | | UCAGACUUUG |
| | | | | | | TTATGGTACA | | | UUAUGGUACA |
| | | | | | | TGTTAGCTAC | | | UGUUAGCUAC |
| | | | | | | TGCTAGGCCA | | | UGCUAGGCCA |
| | | | | | | TCCTTCCCTC | | | UCCUUCCCUC |
| | | | | | | GATAAATGTC | | | GAUAAAUGUC |
| | | | | | | TTGGCATCGT | | | UUGGCAUCGU |
| | | | | | | TTGCTTTG | | | UUGCUUUG |
| | | | | | | [SEQ ID | | | [SEQ ID |
| | | | | | | NO: | | | NO: |
| | | | | | | 2040] | | | 2041] |
| miR- | 2928 | −1.82454 | 0.049772 | TCTGAGAGAA | ACGCCACGTT | TTCCTTCCTC | UCUGAGAGAA | ACGCCACGUU | UUCCUUCCUC |
| 124 | | | | GGAACGTGGG | CATTCGATCA | AGGAGAAAGG | GGAACGUGGG | CAUUCGAUCA | AGGAGAAAGG |
| | | | | TT | GA | CCTCTCTCAC | UU | GA | CCUCUCUCAC |
| | | | | [SEQ ID | [SEQ ID | GCCACGTTCA | [SEQ ID | [SEQ ID | GCCACGUUCA |
| | | | | NO: | NO: | TTCGATCAGA | NO: | NO: | UUCGAUCAGA |
| | | | | 668] | 2042] | ATTTAAATGT | 1196] | 2044] | AUUUAAAUGU |
| | | | | | | CCATACAATT | | | CCAUACAAUU |
| | | | | | | CTGAGAGAAG | | | CUGAGAGAAG |
| | | | | | | GAACGTGGGT | | | GAACGUGGGU |
| | | | | | | TGAATGGGGC | | | UGAAUGGGGC |
| | | | | | | TGGCTGAGCA | | | UGGCUGAGCA |
| | | | | | | CCGTGGGTCG | | | CCGUGGGUCG |
| | | | | | | GCGAGGGCCC | | | GCGAGGGCCC |
| | | | | | | GCCAAGGA | | | GCCAAGGA |
| | | | | | | [SEQ ID | | | [SEQ ID |
| | | | | | | NO: | | | NO: |
| | | | | | | 2043] | | | 2045] |
| miR- | 3043 | −1.7881 | 0.031105 | TTTGGTGCAA | AAGCTGTTTG | TTCCTTCCTC | UUUGGUGCAA | AAGCUGUUUG | UUCCUUCCUC |
| 124 | | | | AACAAACAGG | TGTTGACCCA | AGGAGAAAGG | AACAAACAGG | UGUUGACCCA | AGGAGAAAGG |
| | | | | CT | AA | CCTCTCTCAA | CU | AA | CCUCUCUCAA |
| | | | | [SEQ ID | [SEQ ID | GCTGTTTGTG | [SEQ ID | [SEQ ID | GCUGUUUGUG |
| | | | | NO: | NO: | TTGACCCAAA | NO: | NO: | UUGACCCAAA |
| | | | | 1615] | 2046] | ATTTAAATGT | 1812] | 2048] | AUUUAAAUGU |
| | | | | | | CCATACAATT | | | CCAUACAAUU |
| | | | | | | TTGGTGCAAA | | | UUGGUGCAAA |
| | | | | | | ACAAACAGGC | | | ACAAACAGGC |
| | | | | | | TGAATGGGGC | | | UGAAUGGGGC |
| | | | | | | TGGCTGAGCA | | | UGGCUGAGCA |
| | | | | | | CCGTGGGTCG | | | CCGUGGGUCG |
| | | | | | | GCGAGGGCCC | | | GCGAGGGCCC |
| | | | | | | GCCAAGGA | | | GCCAAGGA |
| | | | | | | [SEQ ID | | | [SEQ ID |
| | | | | | | NO: | | | NO: |
| | | | | | | 2047] | | | 2049] |
| miR- | 3256 | −1.65786 | 0.035613 | TATTGCGTGG | CCGCAGCTTA | TTCCTTCCTC | UAUUGCGUGG | CCGCAGCUUA | UUCCUUCCUC |
| 124 | | | | AGTAAGCTGG | CGCCAAACAA | AGGAGAAAGG | AGUAAGCUGG | CGCCAAACAA | AGGAGAAAGG |
| | | | | TG | TA | CCTCTCTCCC | UG | UA | CCUCUCUCCC |
| | | | | [SEQ ID | [SEQ ID | GCAGCTTACG | [SEQ ID | [SEQ ID | GCAGCUUACG |
| | | | | NO: | NO: | CCAAACAATA | NO: | NO: | CCAAACAAUA |
| | | | | 618] | 2050] | ATTTAAATGT | 308] | 2052] | AUUUAAAUGU |
| | | | | | | CCATACAATT | (Same | | CCAUACAAUU |
| | | | | | | ATTGCGTGGA | as | | AUUGCGUGGA |
| | | | | | | GTAAGCTGGT | XD- | | GUAAGCUGGU |
| | | | | | | GGAATGGGGC | 14890) | | GGAAUGGGGC |
| | | | | | | TGGCTGAGCA | | | UGGCUGAGCA |
| | | | | | | CCGTGGGTCG | | | CCGUGGGUCG |
| | | | | | | GCGAGGGCCC | | | GCGAGGGCCC |
| | | | | | | GCCAAGGA | | | GCCAAGGA |
| | | | | | | [SEQ ID | | | [SEQ ID |
| | | | | | | NO: | | | NO: |
| | | | | | | 2051] | | | 2053] |
| miR- | 2353 | −1.64493 | 0.114403 | TTCGATGCAG | CAGCTGCTAG | TTCCTTCCTC | UUCGAUGCAG | CAGCUGCUAG | UUCCUUCCUC |
| 124 | | | | GACTAGCAGG | TACTGACTCG | AGGAGAAAGG | GACUAGCAGG | UACUGACUCG | AGGAGAAAGG |
| | | | | CG | AA | CCTCTCTCCA | CG | AA | CCUCUCUCCA |
| | | | | [SEQ ID | [SEQ ID | GCTGCTAGTA | [SEQ ID | [SEQ ID | GCUGCUAGUA |
| | | | | NO: | NO: | CTGACTCGAA | NO: | NO: | CUGACUCGAA |
| | | | | 612] | 2054] | ATTTAAATGT | 166] | 2056] | AUUUAAAUGU |
| | | | | | | CCATACAATT | (Same | | CCAUACAAUU |
| | | | | | | TCGATGCAGG | as | | UCGAUGCAGG |
| | | | | | | ACTAGCAGGC | XD- | | ACUAGCAGGC |
| | | | | | | GGAATGGGGC | 14819) | | GGAAUGGGGC |
| | | | | | | TGGCTGAGCA | | | UGGCUGAGCA |
| | | | | | | CCGTGGGTCG | | | CCGUGGGUCG |
| | | | | | | GCGAGGGCCC | | | GCGAGGGCCC |
| | | | | | | GCCAAGGA | | | GCCAAGGA |
| | | | | | | [SEQ ID | | | [SEQ ID |
| | | | | | | NO: | | | NO: |
| | | | | | | 2055] | | | 2057] |
| miR- | 1231 | −1.5099 | −0.27848 | TTCACTTTAG | CCCCTATCAG | TTCCTTCCTC | UUCACUUUAG | CCCCUAUCAG | UUCCUUCCUC |
| 124 | | | | CACTGATAGC | TTCTACCGTG | AGGAGAAAGG | CACUGAUAGC | UUCUACCGUG | AGGAGAAAGG |
| | | | | AG | AA | CCTCTCTCCC | AG | AA | CCUCUCUCCC |
| | | | | [SEQ ID | [SEQ ID | CCTATCAGTT | [SEQ ID | [SEQ ID | CCUAUCAGUU |
| | | | | NO: | NO: | CTACCGTGAA | NO: | NO: | CUACCGUGAA |
| | | | | 1627] | 2058] | ATTTAAATGT | 1825] | 2060] | AUUUAAAUGU |
| | | | | | | CCATACAATT | | | CCAUACAAUU |
| | | | | | | TCACTTTAGC | | | UCACUUUAGC |
| | | | | | | ACTGATAGCA | | | ACUGAUAGCA |
| | | | | | | GGAATGGGGC | | | GGAAUGGGGC |
| | | | | | | TGGCTGAGCA | | | UGGCUGAGCA |
| | | | | | | CCG | | | CCGUG |
| | | | | | | TGGGTCGGCG | | | GGUCGGCGAG |
| | | | | | | AGGGCCCGCC | | | GGCCCGCCAA |
| | | | | | | AAGGA | | | GGA |
| | | | | | | [SEQ ID | | | [SEQ ID |
| | | | | | | NO: | | | NO: |
| | | | | | | 2059] | | | 2061] |
| miR- | 3546 | −1.46171 | −0.28183 | TCGCATACTG | TAGCTTGCTC | TTCCTTCCTC | UCGCAUACUG | UAGCUUGCUC | UUCCUUCCUC |
| 124 | | | | CTGAGCAAGG | ATCAGGCTGC | AGGAGAAAGG | CUGAGCAAGG | AUCAGGCUGC | AGGAGAAAGG |
| | | | | GA | GA | CCTCTCTCTA | GA | GA | CCUCUCUCUA |
| | | | | [SEQ ID | [SEQ ID | GCTTGCTCAT | [SEQ ID | [SEQ ID | GCUUGCUCAU |
| | | | | NO: | NO: | CAGGCTGCGA | NO: | NO: | CAGGCUGCGA |
| | | | | 2062] | 2063] | ATTTAAATGT | 2065] | 2066] | AUUUAAAUGU |
| | | | | | | CCATACAATT | | | CCAUACAAUU |
| | | | | | | CGCATACTGC | | | CGCAUACUGC |
| | | | | | | TGAGCAAGGG | | | UGAGCAAGGG |
| | | | | | | AGAATGGGGC | | | AGAAUGGGGC |
| | | | | | | TGGCTGAGCA | | | UGGCUGAGCA |
| | | | | | | CCGTGGGTCG | | | CCGUGGGUCG |
| | | | | | | GCGAGGGCCC | | | GCGAGGGCCC |
| | | | | | | GCCAAGGA | | | GCCAAGGA |
| | | | | | | [SEQ ID | | | [SEQ ID |
| | | | | | | NO: | | | NO: |
| | | | | | | 2064] | | | 2067] |
| miR- | 893 | −1.42389 | −0.31114 | TTTGTTACTG | CCCAGGTCGA | TTCCTTCCTC | UUUGUUACUG | CCCAGGUCGA | UUCCUUCCUC |
| 124 | | | | TTTCGACCTC | ACCAGGCACA | AGGAGAAAGG | UUUCGACCUC | ACCAGGCACA | AGGAGAAAGG |
| | | | | TG | AA | CCTCTCTCCC | UG | AA | CCUCUCUCCC |
| | | | | [SEQ ID | [SEQ ID | CAGGTCGAAC | [SEQ ID | [SEQ ID | CAGGUCGAAC |
| | | | | NO: | NO: | CAGGCACAAA | NO: | NO: | CAGGCACAAA |
| | | | | 2012] | 2068] | ATTTAAATGT | 2015] | 2070] | AUUUAAAUGU |
| | | | | | | CCATACAATT | | | CCAUACAAUU |
| | | | | | | TTGTTACTGT | | | UUGUUACUGU |
| | | | | | | TTCGACCTCT | | | UUCGACCUCU |
| | | | | | | GGAATGGGGC | | | GGAAUGGGGC |
| | | | | | | TGGCTGAGCA | | | UGGCUGAGCA |
| | | | | | | CCGTGGGTCG | | | CCGUGGGUCG |
| | | | | | | GCGAGGGCCC | | | GCGAGGGCCC |
| | | | | | | GCCAAGGA | | | GCCAAGGA |
| | | | | | | [SEQ ID | | | [SEQ ID |
| | | | | | | NO: | | | NO: |
| | | | | | | 2069] | | | 2071] |
| miR- | 2602 | −1.34373 | 0.049733 | TTTAGTAGTT | ACACTATGGA | TTCCTTCCTC | UUUAGUAGUU | ACACUAUGGA | UUCCUUCCUC |
| 124 | | | | GATCCATAGA | TAAACGCCTA | AGGAGAAAGG | GAUCCAUAGA | UAAACGCCUA | AGGAGAAAGG |
| | | | | TT | AA | CCTCTCTCAC | UU | AA | CCUCUCUCAC |
| | | | | [SEQ ID | [SEQ ID | ACTATGGATA | [SEQ ID | [SEQ ID | ACUAUGGAUA |
| | | | | NO: | NO: | AACGCCTAAA | NO: | NO: | AACGCCUAAA |
| | | | | 1616] | 2072] | ATTTAAATGT | 202] | 2074] | AUUUAAAUGU |
| | | | | | | CCATACAATT | (Same | | CCAUACAAUU |
| | | | | | | TTAGTAGTTG | guide | | UUAGUAGUUG |
| | | | | | | ATCCATAGAT | as | | AUCCAUAGAU |
| | | | | | | TGAATGGGGC | XD- | | UGAAUGGGGC |
| | | | | | | TGGCTGAGCA | 14837) | | UGGCUGAGCA |
| | | | | | | CCGTGGGTCG | | | CCG |
| | | | | | | GCG | | | UGGGU |
| | | | | | | AGGGCCCGCC | | | CGGCG |
| | | | | | | AAGGA | | | AGGGCCCGCC |
| | | | | | | [SEQ ID | | | AAGGA |
| | | | | | | NO: | | | [SEQ ID |
| | | | | | | 2073] | | | NO: |
| | | | | | | | | | 2075] |
| miR- | 2944 | −1.33679 | 0.075742 | TTAGTAGAAG | CCGAGCCAAA | TTCCTTCCTC | UUAGUAGAAG | CCGAGCCAAA | UUCCUUCCUC |
| 124 | | | | GCTTTGGCTG | GACTTACACT | AGGAGAAAGG | GCUUUGGCUG | GACUUACACU | AGGAGAAAGG |
| | | | | AG | AA | CCTCTCTCCC | AG | AA | CCUCUCUCCC |
| | | | | [SEQ ID | [SEQ ID | GAGCCAAAGA | [SEQ ID | [SEQ ID | GAGCCAAAGA |
| | | | | NO: | NO: | CTTACACTAA | NO: | NO: | CUUACACUAA |
| | | | | 684] | 2076] | ATTTAAATGT | 246] | 2078] | AUUUAAAUGU |
| | | | | | | CCATACAATT | (Same | | CCAUACAAUU |
| | | | | | | TAGTAGAAGG | guide | | UAGUAGAAGG |
| | | | | | | CTTTGGCTGA | as | | CUUUGGCUGA |
| | | | | | | GGAATGGGGC | XD- | | GGAAUGGGGC |
| | | | | | | TGGCTGAGCA | 14859) | | UGGCUGAGCA |
| | | | | | | CCGTGGGTCG | | | CCGUGGGUCG |
| | | | | | | GCGAGGGCCC | | | GCGAGGGCCC |
| | | | | | | GCCAAGGA | | | GCCAAGGA |
| | | | | | | [SEQ ID | | | [SEQ ID |
| | | | | | | NO: | | | NO: |
| | | | | | | 2077] | | | 2079] |
| miR- | 3270 | −1.2645 | 0.050943 | TACTGTAGGC | AACCAATATG | TTCCTTCCTC | UACUGUAGGC | AACCAAUAUG | UUCCUUCCUC |
| 124 | | | | AACATATTGC | TGGCCGCCAG | AGGAGAAAGG | AACAUAUUGC | UGGCCGCCAG | AGGAGAAAGG |
| | | | | GT | TA | CCTCTCTCAA | GU | UA | CCUCUCUCAA |
| | | | | [SEQ ID | [SEQ ID | CCAATATGTG | [SEQ ID | [SEQ ID | CCAAUAUGUG |
| | | | | NO: | NO: | GCCGCCAGTA | NO: | NO: | GCCGCCAGUA |
| | | | | 2080] | 2081] | ATTTAAATGT | 2083] | 2084] | AUUUAAAUGU |
| | | | | | | CCATACAATT | | | CCAUACAAUU |
| | | | | | | ACTGTAGGCA | | | ACUGUAGGCA |
| | | | | | | ACATATTGCG | | | ACAUAUUGCG |
| | | | | | | TGAATGGGGC | | | UGAAUGGGGC |
| | | | | | | TGGCTGAGCA | | | UGGCUGAGCA |
| | | | | | | CCGTGGGTCG | | | CCGUGGGUCG |
| | | | | | | GCGAGGGCCC | | | GCGAGGGCCC |
| | | | | | | GCCAAGGA | | | GCCAAGGA |
| | | | | | | [SEQ ID | | | [SEQ ID |
| | | | | | | NO: | | | NO: |
| | | | | | | 2082] | | | 2085] |
| miR- | 3302 | −2.62809 | 0.136636 | TTGAACAAGG | CGCAAATCAG | GCAGGGCCGG | UUGAACAAGG | CGCAAAUCAG | GCAGGGCCGG |
| 130a | | | | GGCTGATTTG | ACCCTTGTTC | CATGCCTCTG | GGCUGAUUUG | ACCCUUGUUC | CAUGCCUCUG |
| | | | | GG | AC | CTGCTGGCCA | GG | AC | CUGCUGGCCA |
| | | | | [SEQ ID | [SEQ ID | CGCAAATCAG | [SEQ ID | [SEQ ID | CGCAAAUCAG |
| | | | | NO: | NO: | ACCCTTGTTC | NO: | NO: | ACCCUUGUUC |
| | | | | 688] | 1644] | ACCTGTCTGC | 1216] | 1839] | ACCUGUCUGC |
| | | | | | | ACCTGTCACT | | | ACCUGUCACU |
| | | | | | | AGTTGAACAA | | | AGUUGAACAA |
| | | | | | | GGGGCTGATT | | | GGGGCUGAUU |
| | | | | | | TGGGTGGCCG | | | UGGGUGGCCG |
| | | | | | | TGTAGTGCTA | | | UGUAGUGCUA |
| | | | | | | CCCAGCGCTG | | | CCCAGCGCUG |
| | | | | | | GCTGCCTCCT | | | GCUGCCUCCU |
| | | | | | | CAGCATTG | | | CAGCAUUG |
| | | | | | | [SEQ ID | | | [SEQ ID |
| | | | | | | NO: | | | NO: |
| | | | | | | 1722] | | | 1919] |
| miR- | 1755 | −2.56989 | 0.011195 | TCGGGTTGAA | CTCACTTCAG | GCAGGGCCGG | UCGGGUUGAA | CUCACUUCAG | GCAGGGCCGG |
| 130a | | | | ATCTGAAGTG | CTTTCAATTC | CATGCCTCTG | AUCUGAAGUG | CUUUCAAUUC | CAUGCCUCUG |
| | | | | TG | GC | CTGCTGGCCA | UG | GC | CUGCUGGCCA |
| | | | | [SEQ ID | [SEQ ID | CTCACTTCAG | [SEQ ID | [SEQ ID | CUCACUUCAG |
| | | | | NO: | NO: | CTTTCAATTC | NO: | NO: | CUUUCAAUUC |
| | | | | 657] | 1648] | GCCTGTCTGC | 1185] | 1843] | GCCUGUCUGC |
| | | | | | | ACCTGTCACT | | | ACCUGUCACU |
| | | | | | | AGTCGGGTTG | | | AGUCGGGUUG |
| | | | | | | AAATCTGAAG | | | AAAUCUGAAG |
| | | | | | | TGTGTGGCCG | | | UGUGUGGCCG |
| | | | | | | TGTAGTGCTA | | | UGUAGUGCUA |
| | | | | | | CCCAGCGCTG | | | CCCAGCGCUG |
| | | | | | | GCTGCCTCCT | | | GCUGCCUCCU |
| | | | | | | CAGCATTG | | | CAGCAUUG |
| | | | | | | [SEQ ID | | | [SEQ ID |
| | | | | | | NO: | | | NO: |
| | | | | | | 1728] | | | 1925] |
| miR- | 3301 | −2.55451 | −0.07529 | TGAACAAGGG | TGCCAAATCA | GCAGGGCCGG | UGAACAAGGG | UGCCAAAUCA | GCAGGGCCGG |
| 130a | | | | GCTGATTTGG | TCCCCTTGTT | CATGCCTCTG | GCUGAUUUGG | UCCCCUUGUU | CAUGCCUCUG |
| | | | | GA | CC | CTGCTGGCCA | GA | CC | CUGCUGGCCA |
| | | | | [SEQ ID | [SEQ ID | TGCCAAATCA | [SEQ ID | [SEQ ID | UGCCAAAUCA |
| | | | | NO: | NO: | TCCCCTTGTT | NO: | NO: | UCCCCUUGUU |
| | | | | 687] | 1649] | CCCTGTCTGC | 1215] | 1844] | CCCUGUCUGC |
| | | | | | | ACCTGTCACT | | | ACCUGUCACU |
| | | | | | | AGTGAACAAG | | | AGUGAACAAG |
| | | | | | | GGGCTGATTT | | | GGGCUGAUUU |
| | | | | | | GGGATGGCCG | | | GGGAUGGCCG |
| | | | | | | TGTAGTGCTA | | | UGUAGUGCUA |
| | | | | | | CCCAGCGCTG | | | CCCAGCGCUG |
| | | | | | | GCTGCCTCCT | | | GCUGCCUCCU |
| | | | | | | CAGCATTG | | | CAGCAUUG |
| | | | | | | [SEQ ID | | | [SEQ ID |
| | | | | | | NO: | | | NO: |
| | | | | | | 1730] | | | 1927] |
| miR- | 3341 | −2.43802 | 0.12379 | ATAGACATGA | GACTCAGCAT | GCAGGGCCGG | AUAGACAUGA | GACUCAGCAU | GCAGGGCCGG |
| 130a | | | | GGATGCTGAG | ACTCATGTTT | CATGCCTCTG | GGAUGCUGAG | ACUCAUGUUU | CAUGCCUCUG |
| | | | | AC | AC | CTGCTGGCCA | AC | AC | CUGCUGGCCA |
| | | | | [SEQ ID | [SEQ ID | GACTCAGCAT | [SEQ ID | [SEQ ID | GACUCAGCAU |
| | | | | NO: | NO: | ACTCATGTTT | NO: | NO: | ACUCAUGUUU |
| | | | | 1617] | 1667] | ACCTGTCTGC | 1813] | 1862] | ACCUGUCUGC |
| | | | | | | ACCTGTCACT | | | ACCUGUCACU |
| | | | | | | AGATAGACAT | | | AGAUAGACAU |
| | | | | | | GAGGATGCTG | | | GAGGAUGCUG |
| | | | | | | AGACTGGCCG | | | AGACUGGCCG |
| | | | | | | TGTAGTGCTA | | | UGUAGUGCUA |
| | | | | | | CCCAGCGCTG | | | CCCAGCGCUG |
| | | | | | | GCTGCCTCCT | | | GCUGCCUCCU |
| | | | | | | CAGCATTG | | | CAGCAUUG |
| | | | | | | [SEQ ID | | | [SEQ ID |
| | | | | | | NO: | | | NO: |
| | | | | | | 1753] | | | 1950] |
| miR- | 3330 | −2.43606 | 0.221874 | TATGCTGAGA | CGACATTATC | GCAGGGCCGG | UAUGCUGAGA | CGACAUUAUC | GCAGGGCCGG |
| 130a | | | | CTGATAATGT | CGTCTCAGTA | CATGCCTCTG | CUGAUAAUGU | CGUCUCAGUA | CAUGCCUCUG |
| | | | | GG | TC | CTGCTGGCCA | GG | UC | CUGCUGGCCA |
| | | | | [SEQ ID | [SEQ ID | CGACATTATC | [SEQ ID | [SEQ ID | CGACAUUAUC |
| | | | | NO: | NO: | CGTCTCAGTA | NO: | NO: | CGUCUCAGUA |
| | | | | 1614] | 1668] | TCCTGTCTGC | 1811] | 1863] | UCCUGUCUGC |
| | | | | | | ACCTGTCACT | | | ACCUGUCACU |
| | | | | | | AGTATGCTGA | | | AGUAUGCUGA |
| | | | | | | GACTGATAAT | | | GACUGAUAAU |
| | | | | | | GTGGTGGCCG | | | GUGGUGGCCG |
| | | | | | | TGTAGTGCTA | | | UGUAGUGCUA |
| | | | | | | CCCAGCGCTG | | | CCCAGCGCUG |
| | | | | | | GCTGCCTCCT | | | GCUGCCUCCU |
| | | | | | | CAGCATTG | | | CAGCAUUG |
| | | | | | | [SEQ ID | | | [SEQ ID |
| | | | | | | NO: | | | NO: |
| | | | | | | 1754] | | | 1951] |
| miR- | 3255 | −2.43262 | 0.01754 | ATTGCGTGGA | CGACCAGCTT | GCAGGGCCGG | AUUGCGUGGA | CGACCAGCUU | GCAGGGCCGG |
| 130a | | | | GTAAGCTGGT | CCTCCACGTA | CATGCCTCTG | GUAAGCUGGU | CCUCCACGUA | CAUGCCUCUG |
| | | | | GG | AC | CTGCTGGCCA | GG | AC | CUGCUGGCCA |
| | | | | [SEQ ID | [SEQ ID | CGACCAGCTT | [SEQ ID | [SEQ ID | CGACCAGCUU |
| | | | | NO: | NO: | CCTCCACGTA | NO: | NO: | CCUCCACGUA |
| | | | | 617] | 1669] | ACCTGTCTGC | 306] | 1864] | ACCUGUCUGC |
| | | | | | | ACCTGTCACT | (Same | | ACCUGUCACU |
| | | | | | | AGATTGCGTG | guide | | AGAUUGCGUG |
| | | | | | | GAGTAAGCTG | as | | GAGUAAGCUG |
| | | | | | | GTGGTGGCCG | XD- | | GUGGUGGCCG |
| | | | | | | TGTAGTGCTA | 14889) | | UGUAGUGCUA |
| | | | | | | CCCAGCGCTG | | | CCCAGCGCUG |
| | | | | | | GCTGCCTCCT | | | GCUGCCUCCU |
| | | | | | | CAGCATTG | | | CAGCAUUG |
| | | | | | | [SEQ ID | | | [SEQ ID |
| | | | | | | NO: | | | NO: |
| | | | | | | 1755] | | | 1952] |
| miR- | 3133 | −2.42664 | 0.412413 | TATGTCTTGG | CTGTGAATCA | GCAGGGCCGG | UAUGUCUUGG | CUGUGAAUCA | GCAGGGCCGG |
| 130a | | | | CTTGATTCAC | CGCCAAGATA | CATGCCTCTG | CUUGAUUCAC | CGCCAAGAUA | CAUGCCUCUG |
| | | | | TG | TC | CTGCTGGCCA | UG | UC | CUGCUGGCCA |
| | | | | [SEQ ID | [SEQ ID | CTGTGAATCA | [SEQ ID | [SEQ ID | CUGUGAAUCA |
| | | | | NO: | NO: | CGCCAAGATA | NO: | NO: | CGCCAAGAUA |
| | | | | 1624] | 1671] | TCCTGTCTGC | 1819] | 1866] | UCCUGUCUGC |
| | | | | | | ACCTGTCACT | | | ACCUGUCACU |
| | | | | | | AGTATGTCTT | | | AGUAUGUCUU |
| | | | | | | GGCTTGATTC | | | GGCUUGAUUC |
| | | | | | | ACTGTGGCCG | | | ACUGUGGCCG |
| | | | | | | TGTAGTGCTA | | | UGUAGUGCUA |
| | | | | | | CCCAGCGCTG | | | CCCAGCGCUG |
| | | | | | | GCTGCCTCCT | | | GCUGCCUCCU |
| | | | | | | CAGCATTG | | | CAGCAUUG |
| | | | | | | [SEQ ID | | | [SEQ ID |
| | | | | | | NO: | | | NO: |
| | | | | | | 1757] | | | 1954] |
| miR- | 3842 | −2.39495 | −0.55009 | AACGTGAGAA | TTCGATCCAT | GCAGGGCCGG | AACGUGAGAA | UUCGAUCCAU | GCAGGGCCGG |
| 130a | | | | GGATGGATCG | ACTTCTCATG | CATGCCTCTG | GGAUGGAUCG | ACUUCUCAUG | CAUGCCUCUG |
| | | | | TA | TC | CTGCTGGCCA | UA | UC | CUGCUGGCCA |
| | | | | [SEQ ID | [SEQ ID | TTCGATCCAT | [SEQ ID | [SEQ ID | UUCGAUCCAU |
| | | | | NO: | NO: | ACTTCTCATG | NO: | NO: | ACUUCUCAUG |
| | | | | 1625] | 1677] | T | 1824] | 1872] | UC |
| | | | | | | CCTGTCTGCA | | | CUGUCUGCAC |
| | | | | | | CCTGTCACTA | | | CUGUCACUAG |
| | | | | | | GAACGTGAGA | | | AACGUGAGAA |
| | | | | | | AGGATGGATC | | | GGAUGGAUCG |
| | | | | | | GTATGGCCGT | | | UAUGGCCGUG |
| | | | | | | GTAGTGCTAC | | | UAGUGCUACC |
| | | | | | | CCAGCGCTGG | | | CAGCGCUGGC |
| | | | | | | CTGCCTCCTC | | | UGCCUCCUCA |
| | | | | | | AGCATTG | | | GCAUUG |
| | | | | | | [SEQ ID | | | [SEQ ID |
| | | | | | | NO: | | | NO: |
| | | | | | | 1767] | | | 1964] |
| miR- | 2586 | −2.38521 | 0.042149 | TAGATTCAGA | CGAAGTTCTA | GCAGGGCCGG | UAGAUUCAGA | CGAAGUUCUA | GCAGGGCCGG |
| 130a | | | | AGTAGAACTT | ATTCTGAATC | CATGCCTCTG | AGUAGAACUU | AUUCUGAAUC | CAUGCCUCUG |
| | | | | GG | TC | CTGCTGGCCA | GG | UC | CUGCUGGCCA |
| | | | | [SEQ ID | [SEQ ID | CGAAGTTCTA | [SEQ ID | [SEQ ID | CGAAGUUCUA |
| | | | | NO: | NO: | ATTCTGAATC | NO: | NO: | AUUCUGAAUC |
| | | | | 1621] | 1679] | TCCTGTCTGC | 1816] | 1874] | UCCUGUCUGC |
| | | | | | | ACCTGTCACT | | | ACCUGUCACU |
| | | | | | | AGTAGATTCA | | | AGUAGAUUCA |
| | | | | | | GAAGTAGAAC | | | GAAGUAGAAC |
| | | | | | | TTGGTGGCCG | | | UUGGUGGCCG |
| | | | | | | TGTAGTGCTA | | | UGUAGUGCUA |
| | | | | | | CCCAGCGCTG | | | CCCAGCGCUG |
| | | | | | | GCTGCCTCCT | | | GCUGCCUCCU |
| | | | | | | CAGCATTG | | | CAGCAUUG |
| | | | | | | [SEQ ID | | | [SEQ ID |
| | | | | | | NO: | | | NO: |
| | | | | | | 1769] | | | 1966] |
| miR- | 2602 | −2.30701 | −0.14983 | TTTAGTAGTT | ATTCTATGGA | GCAGGGCCGG | UUUAGUAGUU | AUUCUAUGGA | GCAGGGCCGG |
| 130a | | | | GATCCATAGA | GCAACTATTA | CATGCCTCTG | GAUCCAUAGA | GCAACUAUUA | CAUGCCUCUG |
| | | | | TT | AC | CTGCTGGCCA | UU | AC | CUGCUGGCCA |
| | | | | [SEQ ID | [SEQ ID | ATTCTATGGA | [SEQ ID | [SEQ ID | AUUCUAUGGA |
| | | | | NO: | NO: | GCAACTATTA | NO: | NO: | GCAACUAUUA |
| | | | | 1616] | 1696] | ACCTGTCTGC | 202] | 1891] | ACCUGUCUGC |
| | | | | | | ACCTGTCACT | (Same | | ACCUGUCACU |
| | | | | | | AGTTTAGTAG | guide | | AGUUUAGUAG |
| | | | | | | TTGATCCATA | as | | UUGAUCCAUA |
| | | | | | | GATTTGGCCG | XD- | | GAUUUGGCCG |
| | | | | | | TGTAGTGCTA | 14837) | | UGUAGUGCUA |
| | | | | | | CCCAGCGCTG | | | CCCAGCGCUG |
| | | | | | | GCTGCCTCCT | | | GCUGCCUCCU |
| | | | | | | CAGCATTG | | | CAGCAUUG |
| | | | | | | [SEQ ID | | | [SEQ ID |
| | | | | | | NO: | | | NO: |
| | | | | | | 1789] | | | 1986] |
| miR- | 3341 | −2.48196 | 0.14613 | ATAGACATGA | GCCTCAGCAT | GCCGTCCGCG | AUAGACAUGA | GCCUCAGCAU | GCCGUCCGCG |
| 132 | | | | GGATGCTGAG | CATAATGTCT | CGCCCCGCCC | GGAUGCUGAG | CAUAAUGUCU | CGCCCCGCCC |
| | | | | AC | AT | CCGCGTCTCC | AC | AU | CCGCGUCUCC |
| | | | | [SEQ ID | [SEQ ID | AGGGGCCTCA | [SEQ ID | [SEQ ID | AGGGGCCUCA |
| | | | | NO: | NO: | GCATCATAAT | NO: | NO: | GCAUCAUAAU |
| | | | | 1617] | 1658] | GTCTATCTGT | 1813] | 1853] | GUCUAUCUGU |
| | | | | | | GGGAACTGGA | | | GGGAACUGGA |
| | | | | | | GGATAGACAT | | | GGAUAGACAU |
| | | | | | | GAGGA | | | GAGGAUG |
| | | | | | | TGCTGAGACC | | | CUGAGACCCC |
| | | | | | | CCCGCAGCAC | | | CGCAGCACGC |
| | | | | | | GCCCACGCGC | | | CCACGCGCCG |
| | | | | | | CGCGCCACGC | | | CGCCACGCCG |
| | | | | | | CGCGCCCCGA | | | CGCCCCGAGC |
| | | | | | | GCC | | | C |
| | | | | | | [SEQ ID | | | [SEQ ID |
| | | | | | | NO: | | | NO: |
| | | | | | | 1742] | | | 1939] |
| miR- | 3302 | −2.43028 | 0.018802 | TTGAACAAGG | CACAAATCAG | GCCGTCCGCG | UUGAACAAGG | CACAAAUCAG | GCCGUCCGCG |
| 132 | | | | GGCTGATTTG | CACATTGTTC | CGCCCCGCCC | GGCUGAUUUG | CACAUUGUUC | CGCCCCGCCC |
| | | | | GG | AA | CCGCGTCTCC | GG | AA | CCGCGUCUCC |
| | | | | [SEQ ID | [SEQ ID | AGGGCACAAA | [SEQ ID | [SEQ ID | AGGGCACAAA |
| | | | | NO: | NO: | TCAGCACATT | NO: | NO: | UCAGCACAUU |
| | | | | 688] | 1670] | GTTCAACTGT | 1216] | 1865] | GUUCAACUGU |
| | | | | | | GGGAACTGGA | | | GGGAACUGGA |
| | | | | | | GGTTGAACAA | | | GGUUGAACAA |
| | | | | | | GGGGCTGATT | | | GGGGCUGAUU |
| | | | | | | TGGGCCCCGC | | | UGGGCCCCGC |
| | | | | | | AGCACGCCCA | | | AGCACGCCCA |
| | | | | | | CGCGCCGCGC | | | CGCGCCGCGC |
| | | | | | | CACGCCGCGC | | | CACGCCGCGC |
| | | | | | | CCCGAGCC | | | CCCGAGCC |
| | | | | | | [SEQ ID | | | [SEQ ID |
| | | | | | | NO: | | | NO: |
| | | | | | | 1756] | | | 1953] |
| miR- | 1755 | −2.41844 | 0.196175 | TCGGGTTGAA | CCCACTTCAG | GCCGTCCGCG | UCGGGUUGAA | CCCACUUCAG | GCCGUCCGCG |
| 132 | | | | ATCTGAAGTG | AGTGCAACCC | CGCCCCGCCC | AUCUGAAGUG | AGUGCAACCC | CGCCCCGCCC |
| | | | | TG | GA | CCGCGTCTCC | UG | GA | CCGCGUCUCC |
| | | | | [SEQ ID | [SEQ ID | AGGGCCCACT | [SEQ ID | [SEQ ID | AGGGCCCACU |
| | | | | NO: | NO: | TCAGAGTGCA | NO: | NO: | UCAGAGUGCA |
| | | | | 657] | 1672] | ACCCGACTGT | 1185] | 1867] | ACCCGACUGU |
| | | | | | | GGGAACTGGA | | | GGGAACUGGA |
| | | | | | | GGTCGGGTTG | | | GGUCGGGUUG |
| | | | | | | AAATCTGAAG | | | AAAUCUGAAG |
| | | | | | | TGTGCCCCGC | | | UGUGCCCCGC |
| | | | | | | AGCACGCCCA | | | AGCACGCCCA |
| | | | | | | CGCGCCGCGC | | | CGCGCCGCGC |
| | | | | | | CACGCCGCGC | | | CACGCCGCGC |
| | | | | | | CCCGAGCC | | | CCCGAGCC |
| | | | | | | [SEQ ID | | | [SEQ ID |
| | | | | | | NO: | | | NO: |
| | | | | | | 1762] | | | 1959] |
| miR- | 2602 | −2.40987 | −0.18915 | TTTAGTAGTT | ACTCTATGGA | GCCGTCCGCG | UUUAGUAGUU | ACUCUAUGGA | GCCGUCCGCG |
| 132 | | | | GATCCATAGA | TAACCTACTA | CGCCCCGCCC | GAUCCAUAGA | UAACCUACUA | CGCCCCGCCC |
| | | | | TT | AA | CCGCGTCTCC | UU | AA | CCGCGUCUCC |
| | | | | [SEQ ID | [SEQ ID | AGGGACTCTA | [SEQ ID | [SEQ ID | AGGGACUCUA |
| | | | | NO: | NO: | TGGATAACCT | NO: | NO: | UGGAUAACCU |
| | | | | 1616] | 1674] | ACTAAACTGT | 202] | 1869] | ACUAAACUGU |
| | | | | | | GGGAACTGGA | (Same | | GGGAACUGGA |
| | | | | | | GGTTTAGTAG | guide | | GGUUUAGUAG |
| | | | | | | TTGATCCATA | as | | UUGAUCCAUA |
| | | | | | | GATTCCCCG | XD- | | GAUUCCCCGC |
| | | | | | | CAGCACGCCC | 14837) | | A |
| | | | | | | ACGCGCCGCG | | | GCACGCCCAC |
| | | | | | | CCACGCCGCG | | | GCGCCGCGCC |
| | | | | | | CCCCGAGCC | | | ACGCCGCGCC |
| | | | | | | [SEQ ID | | | CCGAGCC |
| | | | | | | NO: | | | [SEQ ID |
| | | | | | | 1764] | | | NO: |
| | | | | | | | | | 1961] |
| miR- | 1784 | −2.34143 | −0.26117 | ATTAACTACT | TCCAGACCAA | GCCGTCCGCG | AUUAACUACU | UCCAGACCAA | GCCGUCCGCG |
| 132 | | | | CTTTGGTCTG | ATATTAGTTA | CGCCCCGCCC | CUUUGGUCUG | AUAUUAGUUA | CGCCCCGCCC |
| | | | | AA | AT | CCGCGTCTCC | AA | AU | CCGCGUCUCC |
| | | | | [SEQ ID | [SEQ ID | AGGGTCCAGA | [SEQ ID | [SEQ ID | AGGGUCCAGA |
| | | | | NO: | NO: | CCAAATATTA | NO: | NO: | CCAAAUAUUA |
| | | | | 608] | 1686] | GTTAATCTGT | 112] | 1881] | GUUAAUCUGU |
| | | | | | | GGGAACTGGA | (Same | | GGGAACUGGA |
| | | | | | | GGATTAACTA | guide | | GGAUUAACUA |
| | | | | | | CTCTTTGGTC | as | | CUCUUUGGUC |
| | | | | | | TGAACCCCGC | XD- | | UGAACCCCGC |
| | | | | | | AGCACGCCCA | 14792) | | AGCACGCCCA |
| | | | | | | CGCGCCGCGC | | | CGCGCCGCGC |
| | | | | | | CACGCCGCGC | | | CACGCCGCGC |
| | | | | | | CCCGAGCC | | | CCCGAGCC |
| | | | | | | [SEQ ID | | | [SEQ ID |
| | | | | | | NO: | | | NO: |
| | | | | | | 1779] | | | 1976] |
| miR- | 3338 | −2.2984 | −0.03531 | TACATGAGGA | TAAGTCTCAG | GCCGTCCGCG | UACAUGAGGA | UAAGUCUCAG | GCCGUCCGCG |
| 132 | | | | TGCTGAGACT | CCTACTCATG | CGCCCCGCCC | UGCUGAGACU | CCUACUCAUG | CGCCCCGCCC |
| | | | | GA | TA | CCGCGTCTCC | GA | UA | CCGCGUCUCC |
| | | | | [SEQ ID | [SEQ ID | AGGGTAAGTC | [SEQ ID | [SEQ ID | AGGGUAAGUC |
| | | | | NO: | NO: | TCAGCCTACT | NO: | NO: | UCAGCCUACU |
| | | | | 1620] | 1698] | CATGTACTGT | 314] | 1893] | CAUGUACUGU |
| | | | | | | GGGAACTGGA | (Same | | GGGAACUGGA |
| | | | | | | GGTACATGAG | guide | | GGUACAUGAG |
| | | | | | | GATGCTGAGA | as | | GAUGCUGAGA |
| | | | | | | CTGACCCCGC | XD- | | CUGACCCCGC |
| | | | | | | AGCACGCCCA | 14893) | | AGCACGCCCA |
| | | | | | | CGCGCCGCGC | | | CGCGCCGCGC |
| | | | | | | CACGCCGCGC | | | CACGCCGCGC |
| | | | | | | CCCGAGCC | | | CCCGAGCC |
| | | | | | | [SEQ ID | | | [SEQ ID |
| | | | | | | NO: | | | NO: |
| | | | | | | 1791] | | | 1988] |
| miR- | 2945 | −2.18195 | 0.054975 | TGTAGTAGAA | TAAGCCAAAG | GCCGTCCGCG | UGUAGUAGAA | UAAGCCAAAG | GCCGUCCGCG |
| 132 | | | | GGCTTTGGCT | CATGCTACTA | CGCCCCGCCC | GGCUUUGGCU | CAUGCUACUA | CGCCCCGCCC |
| | | | | GA | CA | CCGCGTCTCC | GA | CA | CCGCGUCUCC |
| | | | | [SEQ ID | [SEQ ID | AGGGTAAGCC | [SEQ ID | [SEQ ID | AGGGUAAGCC |
| | | | | NO: | NO: | AAAGCATGCT | NO: | NO: | AAAGCAUGCU |
| | | | | 685] | 2086] | ACTACACTGT | 1213] | 2088] | ACUACACUGU |
| | | | | | | GGGAACTGGA | (Same | | GGGAACUGGA |
| | | | | | | GGTGTAGTAG | guide | | GGUGUAGUAG |
| | | | | | | AAGGCTTTGG | as | | AAGGCUUUGG |
| | | | | | | CTGACCCCGC | XD- | | CUGACCCCGC |
| | | | | | | AGCACGCCCA | 14860) | | AGCACGCCCA |
| | | | | | | | | | CGCG |
| | | | | | | CGCGCCGCGC | | | CCGCGCCACG |
| | | | | | | CACGCCGCGC | | | CCGCGCCCCG |
| | | | | | | CCCGAGCC | | | AGCC |
| | | | | | | [SEQ ID | | | [SEQ ID |
| | | | | | | NO: | | | NO: |
| | | | | | | 2087] | | | 2089] |
| miR- | 3256 | −2.15429 | 0.256242 | TATTGCGTGG | CCCCAGCTTA | GCCGTCCGCG | UAUUGCGUGG | CCCCAGCUUA | GCCGUCCGCG |
| 132 | | | | AGTAAGCTGG | CGCAACGCAA | CGCCCCGCCC | AGUAAGCUGG | CGCAACGCAA | CGCCCCGCCC |
| | | | | TG | TA | CCGCGTCTCC | UG | UA | CCGCGUCUCC |
| | | | | [SEQ ID | [SEQ ID | AGGGCCCCAG | [SEQ ID | [SEQ ID | AGGGCCCCAG |
| | | | | NO: | NO: | CTTACGCAAC | NO: | NO: | CUUACGCAAC |
| | | | | 618] | 2090] | GCAATACTGT | 308] | 2092] | GCAAUACUGU |
| | | | | | | GGGAACTGGA | (Same | | GGGAACUGGA |
| | | | | | | GGTATTGCGT | as | | GGUAUUGCGU |
| | | | | | | GGAGTAAGCT | XD- | | GGAGUAAGCU |
| | | | | | | GGTGCCCCGC | 14890) | | GGUGCCCCGC |
| | | | | | | AGCACGCCCA | | | AGCACGCCCA |
| | | | | | | CGCGCCGCGC | | | CGCGCCGCGC |
| | | | | | | CACGCCGCGC | | | CACGCCGCGC |
| | | | | | | CCCGAGCC | | | CCCGAGCC |
| | | | | | | [SEQ ID | | | [SEQ ID |
| | | | | | | NO: | | | NO: |
| | | | | | | 2091] | | | 2093] |
| miR- | 3255 | −2.09429 | 0.188946 | ATTGCGTGGA | CAACCAGCTT | GCCGTCCGCG | AUUGCGUGGA | CAACCAGCUU | GCCGUCCGCG |
| 132 | | | | GTAAGCTGGT | AATACACGCA | CGCCCCGCCC | GUAAGCUGGU | AAUACACGCA | CGCCCCGCCC |
| | | | | GG | AT | CCGCGTCTCC | GG | AU | CCGCGUCUCC |
| | | | | [SEQ ID | [SEQ ID | AGGGCAACCA | [SEQ ID | [SEQ ID | AGGGCAACCA |
| | | | | NO: | NO: | GCTTAATACA | NO: | NO: | GCUUAAUACA |
| | | | | 617] | 2094] | CGCAATCTGT | 306] | 2096] | CGCAAUCUGU |
| | | | | | | GGGAACTGGA | (Same | | GGGAACUGGA |
| | | | | | | GGATTGCGTG | guide | | GGAUUGCGUG |
| | | | | | | GAGTAAGCTG | as | | GAGUAAGCUG |
| | | | | | | GTGGCCCCGC | XD- | | GUGGCCCCGC |
| | | | | | | AGCACGCCCA | 14889) | | AGCACGCCCA |
| | | | | | | CGCGCCGCGC | | | CGCGCCGCGC |
| | | | | | | CACGCCGCGC | | | CACGCCGCGC |
| | | | | | | CCCGAGCC | | | CCCGAGCC |
| | | | | | | [SEQ ID | | | [SEQ ID |
| | | | | | | NO: | | | NO: |
| | | | | | | 2095] | | | 2097] |
| miR- | 2928 | −2.08992 | 0.223976 | TCTGAGAGAA | ACCCCACGTT | GCCGTCCGCG | UCUGAGAGAA | ACCCCACGUU | GCCGUCCGCG |
| 132 | | | | GGAACGTGGG | CATGCTCTCA | CGCCCCGCCC | GGAACGUGGG | CAUGCUCUCA | CGCCCCGCCC |
| | | | | TT | GA | CCGCGTCTCC | UU | GA | CCGCGUCUCC |
| | | | | [SEQ ID | [SEQ ID | AGGGACCCCA | [SEQ ID | [SEQ ID | AGGGACCCCA |
| | | | | NO: | NO: | CGTTCATGCT | NO: | NO: | CGUUCAUGCU |
| | | | | 668] | 2098] | CTCAGACTGT | 1196] | 2100] | CUCAGACUGU |
| | | | | | | GGGAACTGGA | | | GGGAACUGGA |
| | | | | | | GGTCTGAGAG | | | GGUCUGAGAG |
| | | | | | | AAGGAACGTG | | | AAGGAACGUG |
| | | | | | | GGTTCCCCGC | | | GGUUCCCCGC |
| | | | | | | AGCACGCCCA | | | AGCACGCCCA |
| | | | | | | CGCGCCGCGC | | | CGCG |
| | | | | | | CAC | | | CCGCGCCACG |
| | | | | | | GCCGCGCCCC | | | CCGCGCCCCG |
| | | | | | | GAGCC | | | AGCC |
| | | | | | | [SEQ ID | | | [SEQ ID |
| | | | | | | NO: | | | NO: |
| | | | | | | 2099] | | | 2101] |
| miR- | 3338 | −2.01915 | −0.127 | TACATGAGGA | TCAGAACAGC | GCCGGCGGAG | UACAUGAGGA | UCAGAACAGC | GCCGGCGGAG |
| 138-2 | | | | TGCTGAGACT | ATCCTCATGA | TTCTGGTATC | UGCUGAGACU | AUCCUCAUGA | UUCUGGUAUC |
| | | | | GA | [SEQ ID | GTTGCTGCTA | GA | [SEQ ID | GUUGCUGCUA |
| | | | | [SEQ ID | NO: | CATGAGGATG | [SEQ ID | NO: | CAUGAGGAUG |
| | | | | NO: | 2102] | CTGAGACTGA | NO: | 2104] | CUGAGACUGA |
| | | | | 1620] | | GACGAGCAGC | 314] | | GACGAGCAGC |
| | | | | | | GCATCCTCTT | (Same | | GCAUCCUCUU |
| | | | | | | ACCCTCAGAA | guide | | ACCCUCAGAA |
| | | | | | | CAGCATCCTC | as | | CAGCAUCCUC |
| | | | | | | ATGAGTTGCA | XD- | | AUGAGUUGCA |
| | | | | | | TCATACCCAT | 14893) | | UCAUACCCAU |
| | | | | | | CCTCTCCAGG | | | CCUCUCCAGG |
| | | | | | | CGAGCCTCGT | | | CGAGCCUCGU |
| | | | | | | GGGACCGG | | | GGGACCGG |
| | | | | | | [SEQ ID | | | [SEQ ID |
| | | | | | | NO: | | | NO: |
| | | | | | | 2103] | | | 2105] |
| miR- | 3330 | −1.83218 | 0.060443 | TATGCTGAGA | CCACTGATCA | GCCGGCGGAG | UAUGCUGAGA | CCACUGAUCA | GCCGGCGGAG |
| 138-2 | | | | CTGATAATGT | GTCTCAGCAA | TTCTGGTATC | CUGAUAAUGU | GUCUCAGCAA | UUCUGGUAUC |
| | | | | GG | [SEQ ID | GTTGCTGCTA | GG | [SEQ ID | GUUGCUGCUA |
| | | | | [SEQ ID | NO: | TGCTGAGACT | [SEQ ID | NO: | UGCUGAGACU |
| | | | | NO: | 2106] | GATAATGTGG | NO: | 2108] | GAUAAUGUGG |
| | | | | 1614] | | GACGAGCAGC | 1811] | | GACGAGCAGC |
| | | | | | | GCATCCTCTT | | | GCAUCCUCUU |
| | | | | | | ACCCCCACTG | | | ACCCCCACUG |
| | | | | | | ATCAGTCTCA | | | AUCAGUCUCA |
| | | | | | | GCAAGTTGCA | | | GCAAGUUGCA |
| | | | | | | TCATACCCAT | | | UCAUACCCAU |
| | | | | | | CCTCTCCAGG | | | CCUCUCCAGG |
| | | | | | | CGAGCCTCGT | | | CGAGCCUCGU |
| | | | | | | GGGACCGG | | | GGGACCGG |
| | | | | | | [SEQ ID | | | [SEQ ID |
| | | | | | | NO: | | | NO: |
| | | | | | | 2107] | | | 2109] |
| miR- | 3043 | −1.6949 | 0.083253 | TTTGGTGCAA | AGCCATTTGT | GCCGGCGGAG | UUUGGUGCAA | AGCCAUUUGU | GCCGGCGGAG |
| 138-2 | | | | AACAAACAGG | TTTGCACCAT | TTCTGGTATC | AACAAACAGG | UUUGCACCAU | UUCUGGUAUC |
| | | | | CT | [SEQ ID | GTTGCTGCTT | CU | [SEQ ID | GUUGCUGCUU |
| | | | | [SEQ ID | NO: | TGGTGCAAAA | [SEQ ID | NO: | UGGUGCAAAA |
| | | | | NO: | 2110] | CAAACAGGCT | NO: | 2112] | CAAACAGGCU |
| | | | | 1615] | | GACGAGCAGC | 1812] | | GACGAGCAGC |
| | | | | | | GCATCCTCTT | | | GCAUCCUCUU |
| | | | | | | ACCCAGCCAT | | | ACCCAGCCAU |
| | | | | | | TTGTTTTGCA | | | UUGUUUUGCA |
| | | | | | | CCATGTTGCA | | | CCAUGUUGCA |
| | | | | | | TCATACCCAT | | | UCAUACCCAU |
| | | | | | | CCTCTCCAGG | | | CCUCUCCAGG |
| | | | | | | CGAGCCTCGT | | | CGAGCCUCGU |
| | | | | | | GGGACCGG | | | GGGACCGG |
| | | | | | | [SEQ ID | | | [SEQ ID |
| | | | | | | NO: | | | NO: |
| | | | | | | 2111] | | | 2113] |
| miR- | 1689 | −1.57706 | −0.53719 | TACGCGGTGA | GGGACCAGAA | GCCGGCGGAG | UACGCGGUGA | GGGACCAGAA | GCCGGCGGAG |
| 138-2 | | | | ATTCTGTCTC | TTCACCGCGA | TTCTGGTATC | AUUCUGUCUC | UUCACCGCGA | UUCUGGUAUC |
| | | | | CC | [SEQ ID | GTTGCTGCTA | CC | [SEQ ID | GUUGCUGCUA |
| | | | | [SEQ ID | NO: | CGCGGTGAAT | [SEQ ID | NO: | CGCGGUGAAU |
| | | | | NO: | 2114] | TCTGTCTCCC | NO: | 2116] | UCUGUCUCCC |
| | | | | 605] | | GACGAGCAGC | 100] | | GACGAGCAGC |
| | | | | | | GCATCCTCTT | (Same | | GCAUCCUCUU |
| | | | | | | ACCCGGGACC | guide | | ACCCGGGACC |
| | | | | | | AGAATTCACC | as | | AGAAUUCACC |
| | | | | | | GCGAGTTGCA | XD- | | GCGAGUUGCA |
| | | | | | | TCATACCCAT | 14786) | | UCAUACCCAU |
| | | | | | | CCTCTCCAGG | | | CCUCUCCAGG |
| | | | | | | CGAGCCTCGT | | | CGAGCCUCGU |
| | | | | | | GGGACCGG | | | GGGACCGG |
| | | | | | | [SEQ ID | | | [SEQ ID |
| | | | | | | NO: | | | NO: |
| | | | | | | 2115] | | | 2117] |
| miR- | 3270 | −1.41498 | 0.087791 | TACTGTAGGC | ACGCTCATGT | GCCGGCGGAG | UACUGUAGGC | ACGCUCAUGU | GCCGGCGGAG |
| 138-2 | | | | AACATATTGC | TGCCTACAGA | TTCTGGTATC | AACAUAUUGC | UGCCUACAGA | UUCUGGUAUC |
| | | | | GT | [SEQ ID | GTTGCTGCTA | GU | [SEQ ID | GUUGCUGCUA |
| | | | | [SEQ ID | NO: | CTGTAGGCAA | [SEQ ID | NO: | CUGUAGGCAA |
| | | | | NO: | 1901] | CATATTGCGT | NO: | 2119] | CAUAUUGCGU |
| | | | | 2080] | | GACGAGCAGC | 2083] | | GACGAGCAGC |
| | | | | | | GCATCCTCTT | | | GCAUCCUCUU |
| | | | | | | ACCCACGCTC | | | ACCCACGCUC |
| | | | | | | ATGTTGCCTA | | | AUGUUGCCUA |
| | | | | | | CAGAGTTGCA | | | CAGAGUUGCA |
| | | | | | | TCATACCCAT | | | UCAUACCCAU |
| | | | | | | CCTCTCCAGG | | | CCUCUCCAGG |
| | | | | | | CGAGCCTCGT | | | CGAGCCUCGU |
| | | | | | | GGGACCGG | | | GGGACCGG |
| | | | | | | [SEQ ID | | | [SEQ ID |
| | | | | | | NO: | | | NO: |
| | | | | | | 2118] | | | 2120] |
| miR- | 2928 | −1.36141 | 0.122452 | TCTGAGAGAA | AACCGCGTTC | GCCGGCGGAG | UCUGAGAGAA | AACCGCGUUC | GCCGGCGGAG |
| 138-2 | | | | GGAACGTGGG | CTTCTCTCAC | TTCTGGTATC | GGAACGUGGG | CUUCUCUCAC | UUCUGGUAUC |
| | | | | TT | [SEQ ID | GTTGCTGCTC | UU | [SEQ ID | GUUGCUGCUC |
| | | | | [SEQ ID | NO: | TGAGAGAAGG | [SEQ ID | NO: | UGAGAGAAGG |
| | | | | NO: | 2121] | AACGTGGGTT | NO: | 2123] | AACGUGGGUU |
| | | | | 668] | | GACGAGCAGC | 1196] | | GACGAGCAGC |
| | | | | | | GCATCCTCTT | | | GCAUCCUCUU |
| | | | | | | ACCCAACCGC | | | ACCCAACCGC |
| | | | | | | GTTCCTTCTC | | | GUUCCUUCUC |
| | | | | | | TCACGTTGCA | | | UCACGUUGCA |
| | | | | | | TCATACCCAT | | | UCAUACCCAU |
| | | | | | | CCTCTCCAGG | | | CCUCUCCAGG |
| | | | | | | CGAGCCTCGT | | | CGAGCCUCGU |
| | | | | | | GGGACCGG | | | GGGACCGG |
| | | | | | | [SEQ ID | | | [SEQ ID |
| | | | | | | NO: | | | NO: |
| | | | | | | 2122] | | | 2124] |
| miR- | 3273 | −1.32764 | 0.033491 | TAGGACTGTA | CAATTGTTGC | GCCGGCGGAG | UAGGACUGUA | CAAUUGUUGC | GCCGGCGGAG |
| 138-2 | | | | GGCAACATAT | CTACAGTCCA | TTCTGGTATC | GGCAACAUAU | CUACAGUCCA | UUCUGGUAUC |
| | | | | TG | [SEQ ID | GTTGCTGCTA | UG | [SEQ ID | GUUGCUGCUA |
| | | | | [SEQ ID | NO: | GGACTGTAGG | [SEQ ID | NO: | GGACUGUAGG |
| | | | | NO: | 2125] | CAACATATTG | NO: | 2127] | CAACAUAUUG |
| | | | | 1628] | | GACGAGCAGC | 1821] | | GACGAGCAGC |
| | | | | | | GCATCCTCTT | | | GCAUCCUCUU |
| | | | | | | ACCCCAATTG | | | ACCCCAAUUG |
| | | | | | | TTGCCTACAG | | | UUGCCUACAG |
| | | | | | | TCCAGTTGCA | | | UCCAGUUGCA |
| | | | | | | TCATACCCAT | | | UCAUACCCAU |
| | | | | | | CCTCTCCAGG | | | CCUCUCCAGG |
| | | | | | | CGAGCCTCGT | | | CGAGCCUCGU |
| | | | | | | GGGACCGG | | | GGGACCGG |
| | | | | | | [SEQ ID | | | [SEQ ID |
| | | | | | | NO: | | | NO: |
| | | | | | | 2126] | | | 2128] |
| miR- | 3255 | −1.19435 | 0.020971 | ATTGCGTGGA | CCACGCCTTA | GCCGGCGGAG | AUUGCGUGGA | CCACGCCUUA | GCCGGCGGAG |
| 138-2 | | | | GTAAGCTGGT | CTCCACGCAT | TTCTGGTATC | GUAAGCUGGU | CUCCACGCAU | UUCUGGUAUC |
| | | | | GG | [SEQ ID | GTTGCTGCAT | GG | [SEQ ID | GUUGCUGCAU |
| | | | | [SEQ ID | NO: | TGCGTGGAGT | [SEQ ID | NO: | UGCGUGGAGU |
| | | | | NO: | 2129] | AAGCTGGTGG | NO: | 2131] | AAGCUGGUGG |
| | | | | 617] | | GACGAGCAGC | 306] | | GACGAGCAGC |
| | | | | | | GCATCCTCTT | (Same | | GCAUCCUCUU |
| | | | | | | ACCCCCACGC | guide | | ACCCCCACGC |
| | | | | | | CTTACTCCAC | as | | CUUACUCCAC |
| | | | | | | GCATGTTGCA | XD- | | GCAUGUUGCA |
| | | | | | | TCATACCCAT | 14889) | | UCAUACCCAU |
| | | | | | | CCTCTCCAGG | | | CCUCUCCAGG |
| | | | | | | CGAGCCTCGT | | | CGAGCCUCGU |
| | | | | | | GGGACCGG | | | GGGACCGG |
| | | | | | | [SEQ ID | | | [SEQ ID |
| | | | | | | NO: | | | NO: |
| | | | | | | 2130] | | | 2132] |
| miR- | 3302 | −1.02575 | −0.2011 | TTGAACAAGG | CCCATCCAGC | GCCGGCGGAG | UUGAACAAGG | CCCAUCCAGC | GCCGGCGGAG |
| 138-2 | | | | GGCTGATTTG | CTCTTGTTCT | TTCTGGTATC | GGCUGAUUUG | CUCUUGUUCU | UUCUGGUAUC |
| | | | | GG | [SEQ ID | GTTGCTGCTT | GG | [SEQ ID | GUUGCUGCUU |
| | | | | [SEQ ID | NO: | GAACAAGGGG | [SEQ ID | NO: | GAACAAGGGG |
| | | | | NO: | 2133] | CTGATTTGGG | NO: | 2135] | CUGAUUUGGG |
| | | | | 688] | | GACGAGCAGC | 1216] | | GACGAGCAGC |
| | | | | | | GCATCCTCTT | | | GCAUCCUCUU |
| | | | | | | ACCCCCCATC | | | ACCCCCCAUC |
| | | | | | | CAGCCTCTTG | | | CAGCCUCUUG |
| | | | | | | TTCTGTTGCA | | | UUCUGUUGCA |
| | | | | | | TCATACCCAT | | | UCAUACCCAU |
| | | | | | | CCTCTCCAGG | | | CCUCUCCAGG |
| | | | | | | CGAGCCTCGT | | | CGAGCCUCGU |
| | | | | | | GGGACCGG | | | GGGACCGG |
| | | | | | | [SEQ ID | | | [SEQ ID |
| | | | | | | NO: | | | NO: |
| | | | | | | 2134] | | | 2136] |
| miR- | 1436 | −0.97653 | 0.111912 | TGAGTTATCT | GCCCAGGAAA | GCCGGCGGAG | UGAGUUAUCU | GCCCAGGAAA | GCCGGCGGAG |
| 138-2 | | | | CTTTCTAAGG | GAGATAACTG | TTCTGGTATC | CUUUCUAAGG | GAGAUAACUG | UUCUGGUAUC |
| | | | | GC | [SEQ ID | GTTGCTGCTG | GC | [SEQ ID | GUUGCUGCUG |
| | | | | [SEQ ID | NO: | AGTTATCTCT | [SEQ ID | NO: | AGUUAUCUCU |
| | | | | NO: | 2137] | TTCTAAGGGC | NO: | 2139] | UUCUAAGGGC |
| | | | | 1632] | | GACGAGCAGC | 1827] | | GACGAGCAGC |
| | | | | | | GCATCCTCTT | | | GCAUCCUCUU |
| | | | | | | ACCCGCCCAG | | | ACCCGCCCAG |
| | | | | | | GAAAGAGATA | | | GAAAGAGAUA |
| | | | | | | ACTGGTTGCA | | | ACUGGUUGCA |
| | | | | | | TCATACCCAT | | | UCAUACCCAU |
| | | | | | | CCTCTCCAGG | | | CCUCUCCAGG |
| | | | | | | CGAGCCTCGT | | | CGAGCCUCGU |
| | | | | | | GGGACCGG | | | GGGACCGG |
| | | | | | | [SEQ ID | | | [SEQ ID |
| | | | | | | NO: | | | NO: |
| | | | | | | 2138] | | | 2140] |
| miR- | 3043 | −2.80802 | 0.325474 | TTTGGTGCAA | CCGGTTTGTT | TCAAGCCATG | UUUGGUGCAA | CCGGUUUGUU | UCAAGCCAUG |
| 144 | | | | AACAAACAGG | TATGCACCAA | CTTCCTGTGC | AACAAACAGG | UAUGCACCAA | CUUCCUGUGC |
| | | | | CT | A | CCCCAGTGGG | CU | A | CCCCAGUGGG |
| | | | | [SEQ ID | [SEQ ID | GCCCTGGCTC | [SEQ ID | [SEQ ID | GCCCUGGCUC |
| | | | | NO: | NO: | CGGTTTGTTT | NO: | NO: | CGGUUUGUUU |
| | | | | 1615] | 1635] | ATGCACCAAA | 1812] | 1830] | AUGCACCAAA |
| | | | | | | AGTTTGCGAT | | | AGUUUGCGAU |
| | | | | | | GAGACACTTT | | | GAGACACUUU |
| | | | | | | GGTGCAAAAC | | | GGUGCAAAAC |
| | | | | | | AAACAGGAGT | | | AAACAGGAGU |
| | | | | | | CCGGGCACCC | | | CCGGGCACCC |
| | | | | | | CCAGCTCTGG | | | CCAGCUCUGG |
| | | | | | | AGCCTGACAA | | | AGCCUGACAA |
| | | | | | | GGAGGACA | | | GGAGGACA |
| | | | | | | [SEQ ID | | | [SEQ ID |
| | | | | | | NO: | | | NO: |
| | | | | | | 1713] | | | 1910] |
| miR- | 2602 | −2.76068 | −0.25422 | TTTAGTAGTT | TCGATGGATC | TCAAGCCATG | UUUAGUAGUU | UCGAUGGAUC | UCAAGCCAUG |
| 144 | | | | GATCCATAGA | ATACTACTAA | CTTCCTGTGC | GAUCCAUAGA | AUACUACUAA | CUUCCUGUGC |
| | | | | TT | A | CCCCAGTGGG | UU | A | CCCCAGUGGG |
| | | | | [SEQ ID | [SEQ ID | GCCCTGGCTT | [SEQ ID | [SEQ ID | GCCCUGGCUU |
| | | | | NO: | NO: | CGATGGATCA | NO: | NO: | CGAUGGAUCA |
| | | | | 1616] | 1636] | TACTACTAAA | 202] | 1831] | UACUACUAAA |
| | | | | | | AGTTTGCGAT | (Same | | AGUUUGCGAU |
| | | | | | | GAGACACTTT | guide | | GAGACACUUU |
| | | | | | | AGTAGTTGAT | as | | AGUAGUUGAU |
| | | | | | | CCATAGAAGT | XD- | | CCAUAGAAGU |
| | | | | | | CCGGGCACCC | 14837) | | CCGGGCACCC |
| | | | | | | CCAGCTCTGG | | | CCAGCUCUGG |
| | | | | | | AGCCTGACAA | | | AGCCUGACAA |
| | | | | | | GGAGGACA | | | GGAGGACA |
| | | | | | | [SEQ ID | | | [SEQ ID |
| | | | | | | NO: | | | NO: |
| | | | | | | 1714] | | | 1911] |
| miR- | 3255 | −2.47679 | −0.08595 | ATTGCGTGGA | ACAAGCTTAC | TCAAGCCATG | AUUGCGUGGA | ACAAGCUUAC | UCAAGCCAUG |
| 144 | | | | GTAAGCTGGT | TGCCACGCAA | CTTCCTGTGC | GUAAGCUGGU | UGCCACGCAA | CUUCCUGUGC |
| | | | | GG | T | CCCCAGTGGG | GG | U | CCCCAGUGGG |
| | | | | [SEQ ID | [SEQ ID | GCCCTGGCTA | [SEQ ID | [SEQ ID | GCCCUGGCUA |
| | | | | NO: | NO: | CAAGCTTACT | NO: | NO: | CAAGCUUACU |
| | | | | 617] | 1660] | GCCACGCAAT | 306] | 1855] | GCCACGCAAU |
| | | | | | | AGTTTGCGAT | (Same | | AGUUUGCGAU |
| | | | | | | GAGACACATT | guide | | GAGACACAUU |
| | | | | | | GCGTGGAGTA | as | | GCGUGGAGUA |
| | | | | | | AGCTGGTAGT | XD- | | AGCUGGUAGU |
| | | | | | | CCGGGCACCC | 14889) | | CCGGGCACCC |
| | | | | | | CCAGCTCTGG | | | CCAGCUCUGG |
| | | | | | | AGCCTGACAA | | | AGCCUGACAA |
| | | | | | | GGAGGACA | | | GGAGGACA |
| | | | | | | [SEQ ID | | | [SEQ ID |
| | | | | | | NO: | | | NO: |
| | | | | | | 1744] | | | 1941] |
| miR- | 1231 | −2.16776 | −0.36035 | TTCACTTTAG | GCGATCAGTG | TCAAGCCATG | UUCACUUUAG | GCGAUCAGUG | UCAAGCCAUG |
| 144 | | | | CACTGATAGC | CATAAAGTGA | CTTCCTGTGC | CACUGAUAGC | CAUAAAGUGA | CUUCCUGUGC |
| | | | | AG | A | CCCCAGTGGG | AG | A | CCCCAGUGGG |
| | | | | [SEQ ID | [SEQ ID | GCCCTGGCTG | [SEQ ID | [SEQ ID | GCCCUGGCUG |
| | | | | NO: | NO: | CGATCAGTGC | NO: | NO: | CGAUCAGUGC |
| | | | | 1627] | 2141] | ATAAAGTGAA | 1825] | 2143] | AUAAAGUGAA |
| | | | | | | AGTTTGCGAT | | | AGUUUGCGAU |
| | | | | | | GAGACACTTC | | | GAGACACUUC |
| | | | | | | ACTTTAGCAC | | | ACUUUAGCAC |
| | | | | | | TGATAGCAGT | | | UGAUAGCAGU |
| | | | | | | CCGGGCACCC | | | CCGGGCACCC |
| | | | | | | CCAGCTCTGG | | | CCAGCUCUGG |
| | | | | | | AGCCTGACAA | | | AGCCUGACAA |
| | | | | | | GGAGGACA | | | GGAGGACA |
| | | | | | | [SEQ ID | | | [SEQ ID |
| | | | | | | NO: | | | NO: |
| | | | | | | 2142] | | | 2144] |
| miR- | 3845 | −2.11363 | −0.36405 | TTGAACGTGA | TCAATCCTTC | TCAAGCCATG | UUGAACGUGA | UCAAUCCUUC | UCAAGCCAUG |
| 144 | | | | GAAGGATGGA | TGCACGTTCA | CTTCCTGTGC | GAAGGAUGGA | UGCACGUUCA | CUUCCUGUGC |
| | | | | TC | A | CCCCAGTGGG | UC | A | CCCCAGUGGG |
| | | | | [SEQ ID | [SEQ ID | GCCCTGGCTT | [SEQ ID | [SEQ ID | GCCCUGGCUU |
| | | | | NO: | NO: | CAATCCTTCT | NO: | NO: | CAAUCCUUCU |
| | | | | 696] | 2145] | GCACGTTCAA | 1224] | 2147] | GCACGUUCAA |
| | | | | | | AGTTTGCGAT | | | AGUUUGCGAU |
| | | | | | | GAGACACTTG | | | GAGACACUUG |
| | | | | | | AACGTGAGAA | | | AACGUGAGAA |
| | | | | | | GGATGGAAGT | | | GGAUGGAAGU |
| | | | | | | CCGGGCACCC | | | CCGGGCACCC |
| | | | | | | CCAGCTCTGG | | | CCAGCUCUGG |
| | | | | | | AGCCTGACAA | | | AGCCUGACAA |
| | | | | | | GGAGGACA | | | GGAGGACA |
| | | | | | | [SEQ ID | | | [SEQ ID |
| | | | | | | NO: | | | NO: |
| | | | | | | 2146] | | | 2148] |
| miR- | 915 | −2.04132 | −0.09574 | AAATCGTAGA | ACGGCCTCAG | TCAAGCCATG | AAAUCGUAGA | ACGGCCUCAG | UCAAGCCAUG |
| 144 | | | | CTGAGGCAGT | TGCTACGATT | CTTCCTGTGC | CUGAGGCAGU | UGCUACGAUU | CUUCCUGUGC |
| | | | | CC | T | CCCCAGTGGG | CC | U | CCCCAGUGGG |
| | | | | [SEQ ID | [SEQ ID | GCCCTGGCTA | [SEQ ID | [SEQ ID | GCCCUGGCUA |
| | | | | NO: | NO: | CGGCCTCAGT | NO: | NO: | CGGCCUCAGU |
| | | | | 2149] | 2150] | GCTACGATTT | 2152] | 2153] | GCUACGAUUU |
| | | | | | | AGTTTGCGAT | | | AGUUUGCGAU |
| | | | | | | GAGACACAAA | | | GAGACACAAA |
| | | | | | | TCGTAGACTG | | | UCGUAGACUG |
| | | | | | | AGGCAGTAGT | | | AGGCAGUAGU |
| | | | | | | CCGGGCACCC | | | CCGGGCACCC |
| | | | | | | CCAGCTCTGG | | | CCAGCUCUGG |
| | | | | | | AGCCTGACAA | | | AGCCUGACAA |
| | | | | | | GGAGGACA | | | GGAGGACA |
| | | | | | | [SEQ ID | | | [SEQ ID |
| | | | | | | NO: | | | NO: |
| | | | | | | 2151] | | | 2154] |
| miR- | 3301 | −1.88293 | 0.071952 | TGAACAAGGG | CCCAATCAGC | TCAAGCCATG | UGAACAAGGG | CCCAAUCAGC | UCAAGCCAUG |
| 144 | | | | GCTGATTTGG | CGCCTTGTTC | CTTCCTGTGC | GCUGAUUUGG | CGCCUUGUUC | CUUCCUGUGC |
| | | | | GA | A | CCCCAGTGGG | GA | A | CCCCAGUGGG |
| | | | | [SEQ ID | [SEQ ID | GCCCTGGCTC | [SEQ ID | [SEQ ID | GCCCUGGCUC |
| | | | | NO: | NO: | CCAATCAGCC | NO: | NO: | CCAAUCAGCC |
| | | | | 687] | 2155] | GCCTTGTTCA | 1215] | 2157] | GCCUUGUUCA |
| | | | | | | AGTTTGCGAT | | | AGUUUGCGAU |
| | | | | | | GAGACACTGA | | | GAGACACUGA |
| | | | | | | ACAAGGGGCT | | | ACAAGGGGCU |
| | | | | | | GATTTGGAGT | | | GAUUUGGAGU |
| | | | | | | CCGGGCACCC | | | CCGGGCACCC |
| | | | | | | CCAGCTCTGG | | | CCAGCUCUGG |
| | | | | | | AGCCTGACAA | | | AGCCUGACAA |
| | | | | | | GGAGGACA | | | GGAGGACA |
| | | | | | | [SEQ ID | | | [SEQ ID |
| | | | | | | NO: | | | NO: |
| | | | | | | 2156] | | | 2158] |
| miR- | 2932 | −1.63 | 0.064183 | TTTGGCTGAG | CGGTCCTTCT | TCAAGCCATG | UUUGGCUGAG | CGGUCCUUCU | UCAAGCCAUG |
| 144 | | | | AGAAGGAACG | CATCAGCCAA | CTTCCTGTGC | AGAAGGAACG | CAUCAGCCAA | CUUCCUGUGC |
| | | | | TG | A | CCCCAGTGGG | UG | A | CCCCAGUGGG |
| | | | | [SEQ ID | [SEQ ID | GCCCTGGCTC | [SEQ ID | [SEQ ID | GCCCUGGCUC |
| | | | | NO: | NO: | GGTCCTTCTC | NO: | NO: | GGUCCUUCUC |
| | | | | 672] | 2159] | ATCAGCCAAA | 1200] | 2161] | AUCAGCCAAA |
| | | | | | | AGTTTGCGAT | | | AGUUUGCGAU |
| | | | | | | GAGACACTTT | | | GAGACACUUU |
| | | | | | | GGCTGAGAGA | | | GGCUGAGAGA |
| | | | | | | AGGAACGAGT | | | AGGAACGAGU |
| | | | | | | CCGGGCACCC | | | CCGGGCACCC |
| | | | | | | CCAGCTCTGG | | | CCAGCUCUGG |
| | | | | | | AGCCTGACAA | | | AGCCUGACAA |
| | | | | | | GGAGGACA | | | GGAGGACA |
| | | | | | | [SEQ ID | | | [SEQ ID |
| | | | | | | NO: | | | NO: |
| | | | | | | 2160] | | | 2162] |
| miR- | 3842 | −1.57752 | −0.42898 | AACGTGAGAA | CGCTCCATCC | TCAAGCCATG | AACGUGAGAA | CGCUCCAUCC | UCAAGCCAUG |
| 144 | | | | GGATGGATCG | TATCTCACGT | CTTCCTGTGC | GGAUGGAUCG | UAUCUCACGU | CUUCCUGUGC |
| | | | | TA | T | CCCCAGTGGG | UA | U | CCCCAGUGGG |
| | | | | [SEQ ID | [SEQ ID | GCCCTGGCTC | [SEQ ID | [SEQ ID | GCCCUGGCUC |
| | | | | NO: | NO: | GCTCCATCCT | NO: | NO: | GCUCCAUCCU |
| | | | | 1625] | 2163] | ATCTCACGTT | 1824] | 2165] | AUCUCACGUU |
| | | | | | | AGTTTGCGAT | | | AGUUUGCGAU |
| | | | | | | GAGACACAAC | | | GAGACACAAC |
| | | | | | | GTGAGAAGGA | | | GUGAGAAGGA |
| | | | | | | TGGATCGAGT | | | UGGAUCGAGU |
| | | | | | | CCGGGCACCC | | | CCGGGCACCC |
| | | | | | | CCAGCTCTGG | | | CCAGCUCUGG |
| | | | | | | AGCCTGACAA | | | AGCCUGACAA |
| | | | | | | GGAGGACA | | | GGAGGACA |
| | | | | | | [SEQ ID | | | [SEQ ID |
| | | | | | | NO: | | | NO: |
| | | | | | | 2164] | | | 2166] |
| miR- | 2353 | −1.4808 | 0.451244 | TTCGATGCAG | CCGGCTAGTC | TCAAGCCATG | UUCGAUGCAG | CCGGCUAGUC | UCAAGCCAUG |
| 144 | | | | GACTAGCAGG | CATGCATCGA | CTTCCTGTGC | GACUAGCAGG | CAUGCAUCGA | CUUCCUGUGC |
| | | | | CG | A | CCCCAGTGGG | CG | A | CCCCAGUGGG |
| | | | | [SEQ ID | [SEQ ID | GCCCTGGCTC | [SEQ ID | [SEQ ID | GCCCUGGCUC |
| | | | | NO: | NO: | CGGCTAGTCC | NO: | NO: | CGGCUAGUCC |
| | | | | 612] | 2167] | ATGCATCGAA | 166] | 2169] | AUGCAUCGAA |
| | | | | | | AGTTTGCGAT | (Same | | AGUUUGCGAU |
| | | | | | | GAGACACTTC | as | | GAGACACUUC |
| | | | | | | GATGCAGGAC | XD- | | GAUGCAGGAC |
| | | | | | | TAGCAGGAGT | 14819) | | UAGCAGGAGU |
| | | | | | | CCGGGCACCC | | | CCGGGCACCC |
| | | | | | | CCAGCTCTGG | | | CCAGCUCUGG |
| | | | | | | AGCCTGACAA | | | AGCCUGACAA |
| | | | | | | GGAGGACA | | | GGAGGACA |
| | | | | | | [SEQ ID | | | [SEQ ID |
| | | | | | | NO: | | | NO: |
| | | | | | | 2168] | | | 2170] |
| miR- | 3302 | −2.52291 | 0.018122 | TTGAACAAGG | CCCAAATCGC | CTGGAGGCTT | UUGAACAAGG | CCCAAAUCGC | CUGGAGGCUU |
| 155E | | | | GGCTGATTTG | CCTTGTTCAA | GCTTTGGGCT | GGCUGAUUUG | CCUUGUUCAA | GCUUUGGGCU |
| | | | | GG | [SEQ ID | GTATGCTGTT | GG | [SEQ ID | GUAUGCUGUU |
| | | | | [SEQ ID | NO: | GAACAAGGGG | [SEQ ID | NO: | GAACAAGGGG |
| | | | | NO: | 1652] | CTGATTTGGG | NO: | 1847] | CUGAUUUGGG |
| | | | | 688] | | TTTTGGCCTC | 1216] | | UUUUGGCCUC |
| | | | | | | TGACTGACCC | | | UGACUGACCC |
| | | | | | | AAATCGCCCT | | | AAAUCGCCCU |
| | | | | | | TGTTCAACAG | | | UGUUCAACAG |
| | | | | | | GACAAGGCCC | | | GACAAGGCCC |
| | | | | | | TTTATCAGCA | | | UUUAUCAGCA |
| | | | | | | CTCACATGGA | | | CUCACAUGGA |
| | | | | | | ACAAATGGCC | | | ACAAAUGGCC |
| | | | | | | ACCGTGGG | | | ACCGUGGG |
| | | | | | | [SEQ ID | | | [SEQ ID |
| | | | | | | NO: | | | NO: |
| | | | | | | 1734] | | | 1931] |
| miR- | 2586 | −2.5179 | −0.10172 | TAGATTCAGA | CCAAGTTCAC | CTGGAGGCTT | UAGAUUCAGA | CCAAGUUCAC | CUGGAGGCUU |
| 155E | | | | AGTAGAACTT | TCTGAATCTA | GCTTTGGGCT | AGUAGAACUU | UCUGAAUCUA | GCUUUGGGCU |
| | | | | GG | [SEQ ID | GTATGCTGTA | GG | [SEQ ID | GUAUGCUGUA |
| | | | | [SEQ ID | NO: | GATTCAGAAG | [SEQ ID | NO: | GAUUCAGAAG |
| | | | | NO: | 1653] | TAGAACTTGG | NO: | 1848] | UAGAACUUGG |
| | | | | 1621] | | TTTTGGCCTC | 1816] | | UUUUGGCCUC |
| | | | | | | TGACTGACCA | | | UGACUGACCA |
| | | | | | | AGTTCACTCT | | | AGUUCACUCU |
| | | | | | | GAATCTACAG | | | GAAUCUACAG |
| | | | | | | GACAAGGCCC | | | GACAAGGCCC |
| | | | | | | TTTATCAGCA | | | UUUAUCAGCA |
| | | | | | | CTCACATGGA | | | CUCACAUGGA |
| | | | | | | ACAAATGGCC | | | ACAAAUGGCC |
| | | | | | | ACCGTGGG | | | ACCGUGGG |
| | | | | | | [SEQ ID | | | [SEQ ID |
| | | | | | | NO: | | | NO: |
| | | | | | | 1736] | | | 1933] |
| miR- | 1755 | −2.39604 | −0.03915 | TCGGGTTGAA | CACACTTCGA | CTGGAGGCTT | UCGGGUUGAA | CACACUUCGA | CUGGAGGCUU |
| 155E | | | | ATCTGAAGTG | TTCAACCCGA | GCTTTGGGCT | AUCUGAAGUG | UUCAACCCGA | GCUUUGGGCU |
| | | | | TG | [SEQ ID | GTATGCTGTC | UG | [SEQ ID | GUAUGCUGUC |
| | | | | [SEQ ID | NO: | GGGTTGAAAT | [SEQ ID | NO: | GGGUUGAAAU |
| | | | | NO: | 1676] | CTGAAGTGTG | NO: | 1871] | CUGAAGUGUG |
| | | | | 657] | | TTTTGGCCTC | 1185] | | UUUUGGCCUC |
| | | | | | | TGACTGACAC | | | UGACUGACAC |
| | | | | | | ACTTCGATTC | | | ACUUCGAUUC |
| | | | | | | AACCCGACAG | | | AACCCGACAG |
| | | | | | | GACAAGGCCC | | | GACAAGGCCC |
| | | | | | | TTTATCAGCA | | | UUUAUCAGCA |
| | | | | | | CTCACATGGA | | | CUCACAUGGA |
| | | | | | | ACAAATGGCC | | | ACAAAUGGCC |
| | | | | | | ACCGTGGG | | | ACCGUGGG |
| | | | | | | [SEQ ID | | | [SEQ ID |
| | | | | | | NO: | | | NO: |
| | | | | | | 1766] | | | 1963] |
| miR- | 3273 | −2.36984 | −0.0801 | TAGGACTGTA | CAATATGTGC | CTGGAGGCTT | UAGGACUGUA | CAAUAUGUGC | CUGGAGGCUU |
| 155E | | | | GGCAACATAT | CACAGTCCTA | GCTTTGGGCT | GGCAACAUAU | CACAGUCCUA | GCUUUGGGCU |
| | | | | TG | [SEQ ID | GTATGCTGTA | UG | [SEQ ID | GUAUGCUGUA |
| | | | | [SEQ ID | NO: | GGACTGTAGG | [SEQ ID | NO: | GGACUGUAGG |
| | | | | NO: | 1683] | CAACATATTG | NO: | 1878] | CAACAUAUUG |
| | | | | 1628] | | TTTTGGCCTC | 1821] | | UUUUGGCCUC |
| | | | | | | TGACTGACAA | | | UGACUGACAA |
| | | | | | | TATGTGCCAC | | | UAUGUGCCAC |
| | | | | | | AGTCCTACAG | | | AGUCCUACAG |
| | | | | | | GACAAGGCCC | | | GACAAGGCCC |
| | | | | | | TTTATCAGCA | | | UUUAUCAGCA |
| | | | | | | CTCACATGGA | | | CUCACAUGGA |
| | | | | | | ACAAATGGCC | | | ACAAAUGGCC |
| | | | | | | ACCGTGGG | | | ACCGUGGG |
| | | | | | | [SEQ ID | | | [SEQ ID |
| | | | | | | NO: | | | NO: |
| | | | | | | 1774] | | | 1971] |
| miR- | 3272 | −2.34055 | −0.19485 | AGGACTGTAG | GCAATATGTG | CTGGAGGCTT | AGGACUGUAG | GCAAUAUGUG | CUGGAGGCUU |
| 155E | | | | GCAACATATT | CTACAGTCCT | GCTTTGGGCT | GCAACAUAUU | CUACAGUCCU | GCUUUGGGCU |
| | | | | GC | [SEQ ID | GTATGCTGAG | GC | [SEQ ID | GUAUGCUGAG |
| | | | | [SEQ ID | NO: | GACTGTAGGC | [SEQ ID | NO: | GACUGUAGGC |
| | | | | NO: | 1687] | AACATATTGC | NO: | 1882] | AACAUAUUGC |
| | | | | 1618] | | TTTTGGCCTC | 1814] | | UUUUGGCCUC |
| | | | | | | TGACTGAGCA | | | UGACUGAGCA |
| | | | | | | ATATGTGCTA | | | AUAUGUGCUA |
| | | | | | | CAGTCCTCAG | | | CAGUCCUCAG |
| | | | | | | GACAAGGCCC | | | GACAAGGCCC |
| | | | | | | TTTATCAGCA | | | UUUAUCAGCA |
| | | | | | | CTCACATGGA | | | CUCACAUGGA |
| | | | | | | ACAAATGGCC | | | ACAAAUGGCC |
| | | | | | | ACCGTGGG | | | ACCGUGGG |
| | | | | | | [SEQ ID | | | [SEQ ID |
| | | | | | | NO: | | | NO: |
| | | | | | | 1780] | | | 1977] |
| miR- | 3330 | −2.26554 | 0.033188 | TATGCTGAGA | CCACATTACA | CTGGAGGCTT | UAUGCUGAGA | CCACAUUACA | CUGGAGGCUU |
| 155E | | | | CTGATAATGT | GCTCAGCATA | GCTTTGGGCT | CUGAUAAUGU | GCUCAGCAUA | GCUUUGGGCU |
| | | | | GG | [SEQ ID | GTATGCTGTA | GG | [SEQ ID | GUAUGCUGUA |
| | | | | [SEQ ID | NO: | TGCTGAGACT | [SEQ ID | NO: | UGCUGAGACU |
| | | | | NO: | 1700] | GATAATGTGG | NO: | 1895] | GAUAAUGUGG |
| | | | | 1614] | | TTTTGGCCTC | 1811] | | UUUUGGCCUC |
| | | | | | | TGACTGACCA | | | UGACUGACCA |
| | | | | | | CATTACAGCT | | | CAUUACAGCU |
| | | | | | | CAGCATACAG | | | CAGCAUACAG |
| | | | | | | GACAAGGCCC | | | GACAAGGCCC |
| | | | | | | TTTATCAGCA | | | UUUAUCAGCA |
| | | | | | | CTCACATGGA | | | CUCACAUGGA |
| | | | | | | ACAAATGGCC | | | ACAAAUGGCC |
| | | | | | | ACCGTGGG | | | ACCGUGGG |
| | | | | | | [SEQ ID | | | [SEQ ID |
| | | | | | | NO: | | | NO: |
| | | | | | | 1793] | | | 1990] |
| miR- | 1162 | −2.26036 | −0.20831 | AACTGTACCA | CAGACTTTTT | CTGGAGGCTT | AACUGUACCA | CAGACUUUUU | CUGGAGGCUU |
| 155E | | | | CAACAAAGTC | GGGTACAGTT | GCTTTGGGCT | CAACAAAGUC | GGGUACAGUU | GCUUUGGGCU |
| | | | | TG | [SEQ ID | GTATGCTGAA | UG | [SEQ ID | GUAUGCUGAA |
| | | | | [SEQ ID | NO: | CTGTACCACA | [SEQ ID | NO: | CUGUACCACA |
| | | | | NO: | 1706] | ACAAAGTCTG | NO: | 1905] | ACAAAGUCUG |
| | | | | 652] | | TTTTGGCCTC | 1180] | | UUUUGGCCUC |
| | | | | | | TGACTGACAG | | | UGACUGACAG |
| | | | | | | ACTTTTTGGG | | | ACUUUUUGGG |
| | | | | | | TACAGTTCAG | | | UACAGUUCAG |
| | | | | | | GACAAGGCCC | | | GACAAGGCCC |
| | | | | | | TTTATCAGCA | | | UUUAUCAGCA |
| | | | | | | CTCACATGGA | | | CUCACAUGGA |
| | | | | | | ACAAATGGCC | | | ACAAAUGGCC |
| | | | | | | ACCGTGGG | | | ACCGUGGG |
| | | | | | | [SEQ ID | | | [SEQ ID |
| | | | | | | NO: | | | NO: |
| | | | | | | 1801] | | | 1998] |
| miR- | 1580 | −2.18059 | −0.26086 | ACTGGAATTT | AGCAGTTCGA | CTGGAGGCTT | ACUGGAAUUU | AGCAGUUCGA | CUGGAGGCUU |
| 155E | | | | CTCTGAACTG | GAATTCCAGT | GCTTTGGGCT | CUCUGAACUG | GAAUUCCAGU | GCUUUGGGCU |
| | | | | CT | [SEQ ID | GTATGCTGAC | CU | [SEQ ID | GUAUGCUGAC |
| | | | | [SEQ ID | NO: | TGGAATTTCT | [SEQ ID | NO: | UGGAAUUUCU |
| | | | | NO: | 2171] | CTGAACTGCT | NO: | 2173] | CUGAACUGCU |
| | | | | 1622] | | TTTTGGCCTC | 1817] | | UUUUGGCCUC |
| | | | | | | TGACTGAAGC | | | UGACUGAAGC |
| | | | | | | AGTTCGAGAA | | | AGUUCGAGAA |
| | | | | | | TTCCAGTCAG | | | UUCCAGUCAG |
| | | | | | | GACAAGGCCC | | | GACAAGGCCC |
| | | | | | | TTTATCAGCA | | | UUUAUCAGCA |
| | | | | | | CTCACATGGA | | | CUCACAUGGA |
| | | | | | | ACAAATGGCC | | | ACAAAUGGCC |
| | | | | | | ACCGTGGG | | | ACCGUGGG |
| | | | | | | [SEQ ID | | | [SEQ ID |
| | | | | | | NO: | | | NO: |
| | | | | | | 2172] | | | 2174] |
| miR- | 1436 | −2.08545 | 0.133624 | TGAGTTATCT | GCCCTTAGAA | CTGGAGGCTT | UGAGUUAUCU | GCCCUUAGAA | CUGGAGGCUU |
| 155E | | | | CTTTCTAAGG | GGATAACTCA | GCTTTGGGCT | CUUUCUAAGG | GGAUAACUCA | GCUUUGGGCU |
| | | | | GC | [SEQ ID | GTATGCTGTG | GC | [SEQ ID | GUAUGCUGUG |
| | | | | [SEQ ID | NO: | AGTTATCTCT | [SEQ ID | NO: | AGUUAUCUCU |
| | | | | NO: | 1710] | TTCTAAGGGC | NO: | 1900] | UUCUAAGGGC |
| | | | | 1632] | | TTTTGGCCTC | 1827] | | UUUUGGCCUC |
| | | | | | | TGACTGAGCC | | | UGACUGAGCC |
| | | | | | | CTTAGAAGGA | | | CUUAGAAGGA |
| | | | | | | TAACTCACAG | | | UAACUCACAG |
| | | | | | | GACAAGGCCC | | | GACAAGGCCC |
| | | | | | | TTTATCAGCA | | | UUUAUCAGCA |
| | | | | | | CTCACATGGA | | | CUCACAUGGA |
| | | | | | | ACAAATGGCC | | | ACAAAUGGCC |
| | | | | | | ACCGTGGG | | | ACCGUGGG |
| | | | | | | [SEQ ID | | | [SEQ ID |
| | | | | | | NO: | | | NO: |
| | | | | | | 2175] | | | 2176] |
| miR- | 3270 | −2.03222 | 0.002948 | TACTGTAGGC | ACGCAATAGT | CTGGAGGCTT | UACUGUAGGC | ACGCAAUAGU | CUGGAGGCUU |
| 155E | | | | AACATATTGC | TCCTACAGTA | GCTTTGGGCT | AACAUAUUGC | UCCUACAGUA | GCUUUGGGCU |
| | | | | GT | | GTATGCTGTA | GU | [SEQ ID | GUAUGCUGUA |
| | | | | [SEQ ID | [SEQ ID | CTGTAGGCAA | [SEQ ID | NO: | CUGUAGGCAA |
| | | | | NO: | NO: | CATATTGCGT | NO: | 2179] | CAUAUUGCGU |
| | | | | 2080] | 2177] | TTTTGGCCTC | 2083] | | UUUUGGCCUC |
| | | | | | | TGACTGAACG | | | UGACUGAACG |
| | | | | | | CAATAGTTCC | | | CAAUAGUUCC |
| | | | | | | TACAGTACAG | | | UACAGUACAG |
| | | | | | | GACAAGGCCC | | | GACAAGGCCC |
| | | | | | | TTTATCAGCA | | | UUUAUCAGCA |
| | | | | | | CTCACATGGA | | | CUCACAUGGA |
| | | | | | | ACAAATGGCC | | | ACAAAUGGCC |
| | | | | | | ACCGTGGG | | | ACCGUGGG |
| | | | | | | [SEQ ID | | | [SEQ ID |
| | | | | | | NO: | | | NO: |
| | | | | | | 2178] | | | 2180] |
| miR- | 3330 | −2.86183 | 0.46905 | TATGCTGAGA | CCATTATCAG | GAGCTCAGTC | UAUGCUGAGA | CCAUUAUCAG | GAGCUCAGUC |
| 190a | | | | CTGATAATGT | TCTCAGCACC | AAACCTGGAT | CUGAUAAUGU | UCUCAGCACC | AAACCUGGAU |
| | | | | GG | [SEQ ID | GCCTTTTCTG | GG | [SEQ ID | GCCUUUUCUG |
| | | | | [SEQ ID | NO: | CAGGCCTCTG | [SEQ ID | NO: | CAGGCCUCUG |
| | | | | NO: | 1634] | TGTATGCTGA | NO: | 1829] | UGUAUGCUGA |
| | | | | 1614] | | G | 1811] | | G |
| | | | | | | ACTGATAATG | | | ACUGAUAAUG |
| | | | | | | TGGTGTTATT | | | UGGUGUUAUU |
| | | | | | | TAATCCACCA | | | UAAUCCACCA |
| | | | | | | TTATCAGTCT | | | UUAUCAGUCU |
| | | | | | | CAGCACCCTA | | | CAGCACCCUA |
| | | | | | | CAGTGTCTTG | | | CAGUGUCUUG |
| | | | | | | CCCTGTCTCC | | | CCCUGUCUCC |
| | | | | | | GGGGGTTCCT | | | GGGGGUUCCU |
| | | | | | | AATAAAG | | | AAUAAAG |
| | | | | | | [SEQ ID | | | [SEQ ID |
| | | | | | | NO: | | | NO: |
| | | | | | | 1712] | | | 1909] |
| miR- | 3302 | −2.64186 | 0.124524 | TTGAACAAGG | CCCATCAGCC | GAGCTCAGTC | UUGAACAAGG | CCCAUCAGCC | GAGCUCAGUC |
| 190a | | | | GGCTGATTTG | CCTTGTTCCC | AAACCTGGAT | GGCUGAUUUG | CCUUGUUCCC | AAACCUGGAU |
| | | | | GG | [SEQ ID | GCCTTTTCTG | GG | [SEQ ID | GCCUUUUCUG |
| | | | | [SEQ ID | NO: | CAGGCCTCTG | [SEQ ID | NO: | CAGGCCUCUG |
| | | | | NO: | 1643] | TGTTGAACAA | NO: | 1838] | UGUUGAACAA |
| | | | | 688] | | GGGGCTGATT | 1216] | | GGGGCUGAUU |
| | | | | | | TGGGTGTTAT | | | UGGGUGUUAU |
| | | | | | | TTAATCCACC | | | UUAAUCCACC |
| | | | | | | CATCAGCCCC | | | CAUCAGCCCC |
| | | | | | | TTGTTCCCCT | | | UUGUUCCCCU |
| | | | | | | ACAGTGTCTT | | | ACAGUGUCUU |
| | | | | | | GCCCTGTCTC | | | GCCCUGUCUC |
| | | | | | | CGGGGGTTCC | | | CGGGGGUUCC |
| | | | | | | TAATAAAG | | | UAAUAAAG |
| | | | | | | [SEQ ID | | | [SEQ ID |
| | | | | | | NO: | | | NO: |
| | | | | | | 1721] | | | 1918] |
| miR- | 1580 | −2.50168 | −0.06321 | ACTGGAATTT | AGCTTCAGAG | GAGCTCAGTC | ACUGGAAUUU | AGCUUCAGAG | GAGCUCAGUC |
| 190a | | | | CTCTGAACTG | AAATTCCAAG | AAACCTGGAT | CUCUGAACUG | AAAUUCCAAG | AAACCUGGAU |
| | | | | CT | [SEQ ID | GCCTTTTCTG | CU | [SEQ ID | GCCUUUUCUG |
| | | | | [SEQ ID | NO: | CAGGCCTCTG | [SEQ ID | NO: | CAGGCCUCUG |
| | | | | NO: | 1654] | TGACTGGAAT | NO: | 1849] | UGACUGGAAU |
| | | | | 1622] | | TTCTCTGAAC | 1817] | | UUCUCUGAAC |
| | | | | | | TGCTTGTTAT | | | UGCUUGUUAU |
| | | | | | | TTAATCCAAG | | | UUAAUCCAAG |
| | | | | | | CTTCAGAGAA | | | CUUCAGAGAA |
| | | | | | | ATTCCAAGCT | | | AUUCCAAGCU |
| | | | | | | ACAGTGTCTT | | | ACAGUGUCUU |
| | | | | | | GCCCTGTCTC | | | GCCCUGUCUC |
| | | | | | | CGGGGGTTCC | | | CGGGGGUUCC |
| | | | | | | TAATAAAG | | | UAAUAAAG |
| | | | | | | [SEQ ID | | | [SEQ ID |
| | | | | | | NO: | | | NO: |
| | | | | | | 1738] | | | 1911] |
| miR- | 1755 | −2.38113 | 0.329455 | TCGGGTTGAA | CACTTCAGAT | GAGCTCAGTC | UCGGGUUGAA | CACUUCAGAU | GAGCUCAGUC |
| 190a | | | | ATCTGAAGTG | TTCAACCCAC | AAACCTGGAT | AUCUGAAGUG | UUCAACCCAC | AAACCUGGAU |
| | | | | TG | [SEQ ID | GCCTTTTCTG | UG | [SEQ ID | GCCUUUUCUG |
| | | | | [SEQ ID | NO: | CAGGCCTCTG | [SEQ ID | NO: | CAGGCCUCUG |
| | | | | NO: | 1680] | TGTCGGGTTG | NO: | 1875] | UGUCGGGUUG |
| | | | | 657] | | AAATCTGAAG | 1185] | | AAAUCUGAAG |
| | | | | | | TGTGTGTTAT | | | UGUGUGUUAU |
| | | | | | | TTAATCCACA | | | UUAAUCCACA |
| | | | | | | CTTCAGATT | | | CUUCAGAU |
| | | | | | | TCAACCCACC | | | UUCAACCCAC |
| | | | | | | TACAGTGTCT | | | CUACAGUGUC |
| | | | | | | TGCCCTGTCT | | | UUGCCCUGUC |
| | | | | | | CCGGGGGTTC | | | UCCGGGGGUU |
| | | | | | | CTAATAAAG | | | CCUAAUAAAG |
| | | | | | | [SEQ ID | | | [SEQ ID |
| | | | | | | NO: | | | NO: |
| | | | | | | 1771] | | | 1968] |
| miR- | 3301 | −2.36785 | 0.195332 | TGAACAAGGG | TCCAATCAGC | GAGCTCAGTC | UGAACAAGGG | UCCAAUCAGC | GAGCUCAGUC |
| 190a | | | | GCTGATTTGG | CCCTTGTTAC | AAACCTGGAT | GCUGAUUUGG | CCCUUGUUAC | AAACCUGGAU |
| | | | | GA | [SEQ ID | GCCTTTTCTG | GA | [SEQ ID | GCCUUUUCUG |
| | | | | [SEQ ID | NO: | CAGGCCTCTG | [SEQ ID | NO: | CAGGCCUCUG |
| | | | | NO: | 1684] | TGTGAACAAG | NO: | 1879] | UGUGAACAAG |
| | | | | 687] | | GGGCTGATTT | 1215] | | GGGCUGAUUU |
| | | | | | | GGGATGTTAT | | | GGGAUGUUAU |
| | | | | | | TTAATCCATC | | | UUAAUCCAUC |
| | | | | | | CAATCAGCCC | | | CAAUCAGCCC |
| | | | | | | CTTGTTACCT | | | CUUGUUACCU |
| | | | | | | ACAGTGTCTT | | | ACAGUGUCUU |
| | | | | | | GCCCTGTCTC | | | GCCCUGUCUC |
| | | | | | | CGGGGGTTCC | | | CGGGGGUUCC |
| | | | | | | TAATAAAG | | | UAAUAAAG |
| | | | | | | [SEQ ID | | | [SEQ ID |
| | | | | | | NO: | | | NO: |
| | | | | | | 1775] | | | 1972] |
| miR- | 3043 | −2.26041 | 0.277711 | TTTGGTGCAA | AGCGTTTGTT | GAGCTCAGTC | UUUGGUGCAA | AGCGUUUGUU | GAGCUCAGUC |
| 190a | | | | AACAAACAGG | TTGCACCACC | AAACCTGGAT | AACAAACAGG | UUGCACCACC | AAACCUGGAU |
| | | | | CT | [SEQ ID | GCCTTTTCTG | CU | [SEQ ID | GCCUUUUCUG |
| | | | | [SEQ ID | NO: | CAGGCCTCTG | [SEQ ID | NO: | CAGGCCUCUG |
| | | | | NO: | 1664] | TGTTTGGTGC | NO: | 1859] | UGUUUGGUGC |
| | | | | 1615] | | AAAACAAACA | 1812] | | AAAACAAACA |
| | | | | | | GGCTTGTTAT | | | GGCUUGUUAU |
| | | | | | | TTAATCCAAG | | | UUAAUCCAAG |
| | | | | | | CGTTTGTTTT | | | CGUUUGUUUU |
| | | | | | | GCACCACCCT | | | GCACCACCCU |
| | | | | | | ACAGTGTCTT | | | ACAGUGUCUU |
| | | | | | | GCCCTGTCTC | | | GCCCUGUCUC |
| | | | | | | CGGGGGTTCC | | | CGGGGGUUCC |
| | | | | | | TAATAAAG | | | UAAUAAAG |
| | | | | | | [SEQ ID | | | [SEQ ID |
| | | | | | | NO: | | | NO: |
| | | | | | | 1800] | | | 1997] |
| miR- | 2586 | −2.24846 | 0.172174 | TAGATTCAGA | CCATTCTACT | GAGCTCAGTC | UAGAUUCAGA | CCAUUCUACU | GAGCUCAGUC |
| 190a | | | | AGTAGAACTT | TCTGAATCCC | AAACCTGGAT | AGUAGAACUU | UCUGAAUCCC | AAACCUGGAU |
| | | | | GG | [SEQ ID | GCCTTTTCTG | GG | [SEQ ID | GCCUUUUCUG |
| | | | | [SEQ ID | NO: | CAGGCCTCTG | [SEQ ID | NO: | CAGGCCUCUG |
| | | | | NO: | 1661] | TGTAGATTCA | NO: | 1856] | UGUAGAUUCA |
| | | | | 1621] | | GAAGTAGAAC | 1816] | | GAAGUAGAAC |
| | | | | | | TTGGTGTTAT | | | UUGGUGUUAU |
| | | | | | | TTAATCCACC | | | UUAAUCCACC |
| | | | | | | ATTCTACTTC | | | AUUCUACUUC |
| | | | | | | TGAATCCCCT | | | UGAAUCCCCU |
| | | | | | | ACAGTGTCTT | | | ACAGUGUCUU |
| | | | | | | GCCCT | | | GCCC |
| | | | | | | GTCTCCGGGG | | | UGUCUCCGGG |
| | | | | | | GTTCCTAATA | | | GGUUCCUAAU |
| | | | | | | AAG | | | AAAG |
| | | | | | | [SEQ ID | | | [SEQ ID |
| | | | | | | NO: | | | NO: |
| | | | | | | 1803] | | | 2000] |
| miR- | 967 | −2.23671 | −0.08895 | ACTGATGTAA | TGGCATATAC | GAGCTCAGTC | ACUGAUGUAA | UGGCAUAUAC | GAGCUCAGUC |
| 190a | | | | GTATATGAAC | TTACATCAAG | AAACCTGGAT | GUAUAUGAAC | UUACAUCAAG | AAACCUGGAU |
| | | | | CA | [SEQ ID | GCCTTTTCTG | CA | [SEQ ID | GCCUUUUCUG |
| | | | | [SEQ ID | NO: | CAGGCCTCTG | [SEQ ID | NO: | CAGGCCUCUG |
| | | | | NO: | 1642] | TGACTGATGT | NO: | 1837] | UGACUGAUGU |
| | | | | 1619] | | AAGTATATGA | 1815] | | AAGUAUAUGA |
| | | | | | | ACCATGTTAT | | | ACCAUGUUAU |
| | | | | | | TTAATCCATG | | | UUAAUCCAUG |
| | | | | | | GCATATACTT | | | GCAUAUACUU |
| | | | | | | ACATCAAGCT | | | ACAUCAAGCU |
| | | | | | | ACAGTGTCTT | | | ACAGUGUCUU |
| | | | | | | GCCCTGTCTC | | | GCCCUGUCUC |
| | | | | | | CGGGGGTTCC | | | CGGGGGUUCC |
| | | | | | | TAATAAAG | | | UAAUAAAG |
| | | | | | | [SEQ ID | | | [SEQ ID |
| | | | | | | NO: | | | NO: |
| | | | | | | 1809] | | | 2006] |
| miR- | 3255 | −2.21465 | 0.46382 | ATTGCGTGGA | CCAAGCTTAC | GAGCTCAGTC | AUUGCGUGGA | CCAAGCUUAC | GAGCUCAGUC |
| 190a | | | | GTAAGCTGGT | TCCACGCACG | AAACCTGGAT | GUAAGCUGGU | UCCACGCACG | AAACCUGGAU |
| | | | | GG | [SEQ ID | GCCTTTTCTG | GG | [SEQ ID | GCCUUUUCUG |
| | | | | [SEQ ID | NO: | CAGGCCTCTG | [SEQ ID | NO: | CAGGCCUCUG |
| | | | | NO: | 1697] | TGATTGCGTG | NO: | 1892] | UGAUUGCGUG |
| | | | | 617] | | GAGTAAGCTG | 306] | | GAGUAAGCUG |
| | | | | | | GTGGTGTTAT | (Same | | GUGGUGUUAU |
| | | | | | | TTAATCCACC | guide | | UUAAUCCACC |
| | | | | | | AAGCTTACTC | as | | AAGCUUACUC |
| | | | | | | CACGCACGCT | XD- | | CACGCACGCU |
| | | | | | | ACAGTGTCTT | 14889) | | ACAGUGUCUU |
| | | | | | | GCCCTGTCTC | | | GCCCUGUCUC |
| | | | | | | CGGGGGTTCC | | | CGGGGGUUCC |
| | | | | | | TAATAAAG | | | UAAUAAAG |
| | | | | | | [SEQ ID | | | [SEQ ID |
| | | | | | | NO: | | | NO: |
| | | | | | | 2181] | | | 2182] |
| miR- | 3341 | −2.17489 | 0.322497 | ATAGACATGA | GTCAGCATCC | GAGCTCAGTC | AUAGACAUGA | GUCAGCAUCC | GAGCUCAGUC |
| 190a | | | | GGATGCTGAG | TCATGTCTCG | AAACCTGGAT | GGAUGCUGAG | UCAUGUCUCG | AAACCUGGAU |
| | | | | AC | [SEQ ID | GCCTTTTCTG | AC | [SEQ ID | GCCUUUUCUG |
| | | | | [SEQ ID | NO: | CAGGCCTCTG | [SEQ ID | NO: | CAGGCCUCUG |
| | | | | NO: | 1703] | TGATAGACAT | NO: | 1898] | UGAUAGACAU |
| | | | | 1617] | | GAGGATGCTG | 1813] | | GAGGAUGCUG |
| | | | | | | AGACTGTTAT | | | AGACUGUUAU |
| | | | | | | TTAATCCAGT | | | UUAAUCCAGU |
| | | | | | | CAGCATCCTC | | | CAGCAUCCUC |
| | | | | | | ATGTCTCGCT | | | AUGUCUCGCU |
| | | | | | | ACAGTGTCTT | | | ACAGUGUCUU |
| | | | | | | GCCCTGTCTC | | | GCCCUGUCUC |
| | | | | | | CGGGGGTTCC | | | CGGGGGUUCC |
| | | | | | | TAATAAAG | | | UAAUAAAG |
| | | | | | | [SEQ ID | | | [SEQ ID |
| | | | | | | NO: | | | NO: |
| | | | | | | 2183] | | | 2184] |
| miR- | 967 | −2.64307 | 0.113083 | ACTGATGTAA | TGGCATATAC | GAGCTCAGTC | ACUGAUGUAA | UGGCAUAUAC | GAGCUCAGUC |
| 190a_ | | | | GTATATGAAC | TTACATCAAG | AAACCTGGAT | GUAUAUGAAC | UUACAUCAAG | AAACCUGGAU |
| M | | | | CA | [SEQ ID | GCCTTTTCTG | CA | [SEQ ID | GCCUUUUCUG |
| | | | | [SEQ ID | NO: | CAGGCGTCTG | [SEQ ID | NO: | CAGGCGUCUG |
| | | | | NO: | 1642] | TGACTGATGT | NO: | 1837] | UGACUGAUGU |
| | | | | 1619] | | AAGTATATGA | 1815] | | AAGUAUAUGA |
| | | | | | | ACCATGTTAT | | | ACCAUGUUAU |
| | | | | | | TTAATCCATG | | | UUAAUCCAUG |
| | | | | | | GCATATACTT | | | GCAUAUACUU |
| | | | | | | ACATCAAGCT | | | ACAUCAAGCU |
| | | | | | | ACAGTCTCTT | | | ACAGUCUCUU |
| | | | | | | GCCCTGTCTC | | | GCCCUGUCUC |
| | | | | | | CGGGGGTTCC | | | CGGGGGUUCC |
| | | | | | | TAATAAAG | | | UAAUAAAG |
| | | | | | | [SEQ ID | | | [SEQ ID |
| | | | | | | NO: | | | NO: |
| | | | | | | 1720] | | | 1917] |
| miR- | 3302 | −2.52395 | 0.249656 | TTGAACAAGG | CCCATCAGCC | GAGCTCAGTC | UUGAACAAGG | CCCAUCAGCC | GAGCUCAGUC |
| 190a_ | | | | GGCTGATTTG | CCTTGTTCCC | AAACCTGGAT | GGCUGAUUUG | CCUUGUUCCC | AAACCUGGAU |
| M | | | | GG | [SEQ ID | GCCTTTTCTG | GG | [SEQ ID | GCCUUUUCUG |
| | | | | [SEQ ID | NO: | CAGGCGTCTG | [SEQ ID | NO: | CAGGCGUCUG |
| | | | | NO: | 1643] | TGTTGAACAA | NO: | 1838] | UGUUGAACAA |
| | | | | 688] | | GGGGCTGATT | 1216] | | GGGGCUGAUU |
| | | | | | | TGGGTGTTAT | | | UGGGUGUUAU |
| | | | | | | TTAATCCACC | | | UUAAUCCACC |
| | | | | | | CATCAGCCCC | | | CAUCAGCCCC |
| | | | | | | TTGTTCCCCT | | | UUGUUCCCCU |
| | | | | | | ACAGTCTCTT | | | ACAGUCUCUU |
| | | | | | | GCCCTGTCTC | | | GCCCUGUCUC |
| | | | | | | CGGGGGTTCC | | | CGGGGGUUCC |
| | | | | | | TAATAAAG | | | UAAUAAAG |
| | | | | | | [SEQ ID | | | [SEQ ID |
| | | | | | | NO: | | | NO: |
| | | | | | | 1733] | | | 1930] |
| miR- | 2586 | −2.46486 | 0.014777 | TAGATTCAGA | CCATTCTACT | GAGCTCAGTC | UAGAUUCAGA | CCAUUCUACU | GAGCUCAGUC |
| 190a_ | | | | AGTAGAACTT | TCTGAATCCC | AAACCTGGAT | AGUAGAACUU | UCUGAAUCCC | AAACCUGGAU |
| M | | | | GG | [SEQ ID | GCCTTTTCTG | GG | [SEQ ID | GCCUUUUCUG |
| | | | | [SEQ ID | NO: | CAGGCGTCTG | [SEQ ID | NO: | CAGGCGUCUG |
| | | | | NO: | 1661] | TGTAGATTCA | NO: | 1856] | UGUAGAUUCA |
| | | | | 1621] | | GAAGTAGAAC | 1816] | | GAAGUAGAAC |
| | | | | | | TTGGTGTTAT | | | UUGGUGUUAU |
| | | | | | | TTAATCCACC | | | UUAAUCCACC |
| | | | | | | ATTCTACTTC | | | AUUCUACUUC |
| | | | | | | TGAATCCCCT | | | UGAAUCCCCU |
| | | | | | | ACAGTCTCTT | | | ACAGUCUCUU |
| | | | | | | GCCCTGTCTC | | | GCCCUGUCUC |
| | | | | | | CGGGGGTTCC | | | CGGGGGUUCC |
| | | | | | | TAATAAAG | | | UAAUAAAG |
| | | | | | | [SEQ ID | | | [SEQ ID |
| | | | | | | NO: | | | NO: |
| | | | | | | 1746] | | | 1943] |
| miR- | 3043 | −2.44458 | 0.289334 | TTTGGTGCAA | AGCGTTTGTT | GAGCTCAGTC | UUUGGUGCAA | AGCGUUUGUU | GAGCUCAGUC |
| 190a_ | | | | AACAAACAGG | TTGCACCACC | AAACCTGGAT | AACAAACAGG | UUGCACCACC | AAACCUGGAU |
| M | | | | CT | [SEQ ID | GCCTTTTCTG | CU | [SEQ ID | GCCUUUUCUG |
| | | | | [SEQ ID | NO: | CAGGCGTC | [SEQ ID | NO: | CAGGCGUCU |
| | | | | NO: | 1664] | TGTGTTTGGT | NO: | 1859] | GUGUUUGGUG |
| | | | | 1615] | | GCAAAACAAA | 1812] | | CAAAACAAAC |
| | | | | | | CAGGCTTGTT | | | AGGCUUGUUA |
| | | | | | | ATTTAATCCA | | | UUUAAUCCAA |
| | | | | | | AGCGTTTGTT | | | GCGUUUGUUU |
| | | | | | | TTGCACCACC | | | UGCACCACCC |
| | | | | | | CTACAGTCTC | | | UACAGUCUCU |
| | | | | | | TTGCCCTGTC | | | UGCCCUGUCU |
| | | | | | | TCCGGGGGTT | | | CCGGGGGUUC |
| | | | | | | CCTAATAAAG | | | CUAAUAAAG |
| | | | | | | [SEQ ID | | | [SEQ ID |
| | | | | | | NO: | | | NO: |
| | | | | | | 1750] | | | 1947] |
| miR- | 1755 | −2.34216 | 0.272299 | TCGGGTTGAA | CACTTCAGAT | GAGCTCAGTC | UCGGGUUGAA | CACUUCAGAU | GAGCUCAGUC |
| 190a_ | | | | ATCTGAAGTG | TTCAACCCAC | AAACCTGGAT | AUCUGAAGUG | UUCAACCCAC | AAACCUGGAU |
| M | | | | TG | [SEQ ID | GCCTTTTCTG | UG | [SEQ ID | GCCUUUUCUG |
| | | | | [SEQ ID | NO: | CAGGCGTCTG | [SEQ ID | NO: | CAGGCGUCUG |
| | | | | NO: | 1680] | TGTCGGGTTG | NO: | 1875] | UGUCGGGUUG |
| | | | | 657] | | AAATCTGAAG | 1185] | | AAAUCUGAAG |
| | | | | | | TGTGTGTTAT | | | UGUGUGUUAU |
| | | | | | | TTAATCCACA | | | UUAAUCCACA |
| | | | | | | CTTCAGATTT | | | CUUCAGAUUU |
| | | | | | | CAACCCACCT | | | CAACCCACCU |
| | | | | | | ACAGTCTCTT | | | ACAGUCUCUU |
| | | | | | | GCCCTGTCTC | | | GCCCUGUCUC |
| | | | | | | CGGGGGTTCC | | | CGGGGGUUCC |
| | | | | | | TAATAAAG | | | UAAUAAAG |
| | | | | | | [SEQ ID | | | [SEQ ID |
| | | | | | | NO: | | | NO: |
| | | | | | | 1778] | | | 1975] |
| miR- | 3269 | −2.3297 | 0.037293 | ACTGTAGGCA | CACAATATGT | GAGCTCAGTC | ACUGUAGGCA | CACAAUAUGU | GAGCUCAGUC |
| 190a_ | | | | ACATATTGCG | TGCCTACAAG | AAACCTGGAT | ACAUAUUGCG | UGCCUACAAG | AAACCUGGAU |
| M | | | | TG | [SEQ ID | GCCTTTTCTG | UG | [SEQ ID | GCCUUUUCUG |
| | | | | [SEQ ID | NO: | CAGGCGTCTG | [SEQ ID | NO: | CAGGCGUCUG |
| | | | | NO: | 1689] | TGACTGTAGG | NO: | 1884] | UGACUGUAGG |
| | | | | 1629] | | CAACATATTG | 1822] | | CAACAUAUUG |
| | | | | | | CGTGTGTTAT | | | CGUGUGUUAU |
| | | | | | | TTAATCCACA | | | UUAAUCCACA |
| | | | | | | CAATATGTTG | | | CAAUAUGUUG |
| | | | | | | CCTACAAGCT | | | CCUACAAGCU |
| | | | | | | ACAGTCTCTT | | | ACAGUCUCUU |
| | | | | | | GCCCTGTCTC | | | GCCCUGUCUC |
| | | | | | | CGGGGGTTCC | | | CGGGGGUUCC |
| | | | | | | TAATAAAG | | | UAAUAAAG |
| | | | | | | [SEQ ID | | | [SEQ ID |
| | | | | | | NO: | | | NO: |
| | | | | | | 1782] | | | 1979] |
| miR- | 3255 | −2.30348 | 0.418205 | ATTGCGTGGA | CCAAGCTTAC | GAGCTCAGTC | AUUGCGUGGA | CCAAGCUUAC | GAGCUCAGUC |
| 190a_ | | | | GTAAGCTGGT | TCCACGCACG | AAACCTGGAT | GUAAGCUGGU | UCCACGCACG | AAACCUGGAU |
| M | | | | GG | [SEQ ID | GCCTTTTCTG | GG | [SEQ ID | GCCUUUUCUG |
| | | | | [SEQ ID | NO: | CAGGCGTCTG | [SEQ ID | NO: | CAGGCGUCUG |
| | | | | NO: | 1697] | TGATTGCGTG | NO: | 1892] | UGAUUGCGUG |
| | | | | 617] | | GAGTAAGCTG | 306] | | GAGUAAGCUG |
| | | | | | | GTGGTGTTAT | (Same | | GUGGUGUUAU |
| | | | | | | TTAATCCACC | guide | | UUAAUCCACC |
| | | | | | | AAGCTTACT | as | | AAGCUUAC |
| | | | | | | CCACGCACGC | XD- | | UCCACGCACG |
| | | | | | | TACAGTCTCT | 14889) | | CUACAGUCUC |
| | | | | | | TGCCCTGTCT | | | UUGCCCUGUC |
| | | | | | | CCGGGGGTTC | | | UCCGGGGGUU |
| | | | | | | CTAATAAAG | | | CCUAAUAAAG |
| | | | | | | [SEQ ID | | | [SEQ ID |
| | | | | | | NO: | | | NO: |
| | | | | | | 1790] | | | 1987] |
| miR- | 3341 | −2.26383 | 0.394316 | ATAGACATGA | GTCAGCATCC | GAGCTCAGTC | AUAGACAUGA | GUCAGCAUCC | GAGCUCAGUC |
| 190a_ | | | | GGATGCTGAG | TCATGTCTCG | AAACCTGGAT | GGAUGCUGAG | UCAUGUCUCG | AAACCUGGAU |
| M | | | | AC | [SEQ ID | GCCTTTTCTG | AC | [SEQ ID | GCCUUUUCUG |
| | | | | [SEQ ID | NO: | CAGGCGTCTG | [SEQ ID | NO: | CAGGCGUCUG |
| | | | | NO: | 1703] | TGATAGACAT | NO: | 1898] | UGAUAGACAU |
| | | | | 1617] | | GAGGATGCTG | 1813] | | GAGGAUGCUG |
| | | | | | | AGACTGTTAT | | | AGACUGUUAU |
| | | | | | | TTAATCCAGT | | | UUAAUCCAGU |
| | | | | | | CAGCATCCTC | | | CAGCAUCCUC |
| | | | | | | ATGTCTCGCT | | | AUGUCUCGCU |
| | | | | | | ACAGTCTCTT | | | ACAGUCUCUU |
| | | | | | | GCCCTGTCTC | | | GCCCUGUCUC |
| | | | | | | CGGGGGTTCC | | | CGGGGGUUCC |
| | | | | | | TAATAAAG | | | UAAUAAAG |
| | | | | | | [SEQ ID | | | [SEQ ID |
| | | | | | | NO: | | | NO: |
| | | | | | | 1796] | | | 1993] |
| miR- | 1436 | −2.18684 | 0.218825 | TGAGTTATCT | GCCTAGAAAG | GAGCTCAGTC | UGAGUUAUCU | GCCUAGAAAG | GAGCUCAGUC |
| 190a_ | | | | CTTTCTAAGG | AGATAACTAC | AAACCTGGAT | CUUUCUAAGG | AGAUAACUAC | AAACCUGGAU |
| M | | | | GC | [SEQ ID | GCCTTTTCTG | GC | [SEQ ID | GCCUUUUCUG |
| | | | | [SEQ ID | NO: | CAGGCGTCTG | [SEQ ID | NO: | CAGGCGUCUG |
| | | | | NO: | 2185] | TGTGAGTTAT | NO: | 1899] | UGUGAGUUAU |
| | | | | 1632] | | CTCTTTCTAA | 1827] | | CUCUUUCUAA |
| | | | | | | GGGCTGTTAT | | | GGGCUGUUAU |
| | | | | | | TTAATCCAGC | | | UUAAUCCAGC |
| | | | | | | CTAGAAAGAG | | | CUAGAAAGAG |
| | | | | | | ATAACTACCT | | | AUAACUACCU |
| | | | | | | ACAGTCTCTT | | | ACAGUCUCUU |
| | | | | | | GCCCTGTCTC | | | GCCCUGUCUC |
| | | | | | | CGGGGGTTCC | | | CGGGGGUUCC |
| | | | | | | TAATAAAG | | | UAAUAAAG |
| | | | | | | [SEQ ID | | | [SEQ ID |
| | | | | | | NO: | | | NO: |
| | | | | | | 2186] | | | 2187] |
| miR- | 3330 | −2.17382 | 0.344749 | TATGCTGAGA | CCATTATCAG | GAGCTCAGTC | UAUGCUGAGA | CCAUUAUCAG | GAGCUCAGUC |
| 190a_ | | | | CTGATAATGT | TCTCAGCACC | AAACCTGGAT | CUGAUAAUGU | UCUCAGCACC | AAACCUGGAU |
| M | | | | GG | [SEQ ID | GCCTTTTCTG | GG | [SEQ ID | GCCUUUUCUG |
| | | | | [SEQ ID | NO: | CAGGCGTCTG | [SEQ ID | NO: | CAGGCGUCUG |
| | | | | NO: | 1634] | TGTATGCTGA | NO: | 1829] | UGUAUGCUGA |
| | | | | 1614] | | GACTGATAAT | 1811] | | GACUGAUAAU |
| | | | | | | GTGGTGTTAT | | | GUGGUGUUAU |
| | | | | | | TTAATCCACC | | | UUAAUCCACC |
| | | | | | | ATTATCAGTC | | | AUUAUCAGUC |
| | | | | | | TCAGCACCCT | | | UCAGCACCCU |
| | | | | | | ACAGTCTCTT | | | ACAGUCUCUU |
| | | | | | | GCCCT | | | GCCC |
| | | | | | | GTCTCCGGGG | | | UGUCUCCGGG |
| | | | | | | GTTCCTAATA | | | GGUUCCUAAU |
| | | | | | | AAG | | | AAAG |
| | | | | | | [SEQ ID | | | [SEQ ID |
| | | | | | | NO: | | | NO: |
| | | | | | | 2188] | | | 2189] |
| miR | 3302 | −2.42428 | 0.285147 | TTGAACAAGG | CCCAAATCGC | CCTGGAGGCT | UUGAACAAGG | CCCAAAUCGC | CCUGGAGGCU |
| 155-M | | | | GGCTGATTTG | CCTTGTTCAA | TGCTGAAGGC | GGCUGAUUUG | CCUUGUUCAA | UGCUGAAGGC |
| | | | | GG | [SEQ ID | TGTATGCTGT | GG | [SEQ ID | UGUAUGCUGU |
| | | | | [SEQ ID | NO: | TGAACAAGGG | [SEQ ID | NO: | UGAACAAGGG |
| | | | | NO: | 1652] | GCTGATTTGG | NO: | 1847] | GCUGAUUUGG |
| | | | | 688] | | GTTTTGGCCA | 1216] | | GUUUUGGCCA |
| | | | | | | CTGACTGACC | | | CUGACUGACC |
| | | | | | | CAAATCGCCC | | | CAAAUCGCCC |
| | | | | | | TTGTTCAACA | | | UUGUUCAACA |
| | | | | | | GGACACAAGG | | | GGACACAAGG |
| | | | | | | CCTGTTACTA | | | CCUGUUACUA |
| | | | | | | GCACTCACAT | | | GCACUCACAU |
| | | | | | | GGAACAAATG | | | GGAACAAAUG |
| | | | | | | GCCACCGG | | | GCCACCGG |
| | | | | | | [SEQ ID | | | [SEQ ID |
| | | | | | | NO: | | | NO: |
| | | | | | | 1758] | | | 1955] |
| miR | 2586 | −2.4228 | −0.13209 | TAGATTCAGA | CCAAGTTCAC | CCTGGAGGCT | UAGAUUCAGA | CCAAGUUCAC | CCUGGAGGCU |
| 155-M | | | | AGTAGAACTT | TCTGAATCTA | TGCTGAAGGC | AGUAGAACUU | UCUGAAUCUA | UGCUGAAGGC |
| | | | | GG | [SEQ ID | TGTATGCTGT | GG | [SEQ ID | UGUAUGCUGU |
| | | | | [SEQ ID | NO: | AGATTCAGAA | [SEQ ID | NO: | AGAUUCAGAA |
| | | | | NO: | 1653] | GTAGAACTTG | NO: | 1848] | GUAGAACUUG |
| | | | | 1621] | | GTTTTGGCCA | 1816] | | GUUUUGGCCA |
| | | | | | | CTGACTGACC | | | CUGACUGACC |
| | | | | | | AAGTTCACTC | | | AAGUUCACUC |
| | | | | | | TGAATCTACA | | | UGAAUCUACA |
| | | | | | | GGACACAAGG | | | GGACACAAGG |
| | | | | | | CCTGTTACTA | | | CCUGUUACUA |
| | | | | | | GCACTCACAT | | | GCACUCACAU |
| | | | | | | GGAACAAATG | | | GGAACAAAUG |
| | | | | | | GCCACCGG | | | GCCACCGG |
| | | | | | | [SEQ ID | | | [SEQ ID |
| | | | | | | NO: | | | NO: |
| | | | | | | 1759] | | | 1956] |
| miR | 1436 | −2.22884 | 0.141256 | TGAGTTATCT | GCCCTTAGAA | CCTGGAGGCT | UGAGUUAUCU | GCCCUUAGAA | CCUGGAGGCU |
| 155-M | | | | CTTTCTAAGG | GGATAACTCA | TGCTGAAGGC | CUUUCUAAGG | GGAUAACUCA | UGCUGAAGGC |
| | | | | GC | [SEQ ID | TGTATGCTGT | GC | [SEQ ID | UGUAUGCUGU |
| | | | | [SEQ ID | NO: | GAGTTATCTC | [SEQ ID | NO: | GAGUUAUCUC |
| | | | | NO: | 1710] | TTTCTAAGGG | NO: | 1900] | UUUCUAAGGG |
| | | | | 1632] | | CTTTTGGCCA | 1827] | | CUUUUGGCCA |
| | | | | | | CTGACTGAGC | | | CUGACUGAGC |
| | | | | | | CCTTAGAAGG | | | CCUUAGAAGG |
| | | | | | | ATAACTCACA | | | AUAACUCACA |
| | | | | | | GGACACAAGG | | | GGACACAAGG |
| | | | | | | CCTGTTACTA | | | CCUGUUACUA |
| | | | | | | GCACTCACAT | | | GCACUCACAU |
| | | | | | | GGAA | | | GGAACAAAUG |
| | | | | | | CAAATGGCCA | | | GCCACCGG |
| | | | | | | CCGG | | | [SEQ ID |
| | | | | | | [SEQ ID | | | NO: |
| | | | | | | NO: | | | 2007] |
| | | | | | | 1810] | | | |
| miR | 3272 | −2.02279 | −0.09047 | AGGACTGTAG | GCAATATGTG | CCTGGAGGCT | AGGACUGUAG | GCAAUAUGUG | CCUGGAGGCU |
| 155-M | | | | GCAACATATT | CTACAGTCCT | TGCTGAAGGC | GCAACAUAUU | CUACAGUCCU | UGCUGAAGGC |
| | | | | GC | [SEQ ID | TGTATGCTGA | GC | [SEQ ID | UGUAUGCUGA |
| | | | | [SEQ ID | NO: | GGACTGTAGG | [SEQ ID | NO: | GGACUGUAGG |
| | | | | NO: | 1687] | CAACATATTG | NO: | 1882] | CAACAUAUUG |
| | | | | 1618] | | CTTTTGGCCA | 1814] | | CUUUUGGCCA |
| | | | | | | CTGACTGAGC | | | CUGACUGAGC |
| | | | | | | AATATGTGCT | | | AAUAUGUGCU |
| | | | | | | ACAGTCCTCA | | | ACAGUCCUCA |
| | | | | | | GGACACAAGG | | | GGACACAAGG |
| | | | | | | CCTGTTACTA | | | CCUGUUACUA |
| | | | | | | GCACTCACAT | | | GCACUCACAU |
| | | | | | | GGAACAAATG | | | GGAACAAAUG |
| | | | | | | GCCACCGG | | | GCCACCGG |
| | | | | | | [SEQ ID | | | [SEQ ID |
| | | | | | | NO: | | | NO: |
| | | | | | | 2190] | | | 2191] |
| miR | 1755 | −1.98201 | −0.05599 | TCGGGTTGAA | CACACTTCGA | CCTGGAGGCT | UCGGGUUGAA | CACACUUCGA | CCUGGAGGCU |
| 155-M | | | | ATCTGAAGTG | TTCAACCCGA | TGCTGAAGGC | AUCUGAAGUG | UUCAACCCGA | UGCUGAAGGC |
| | | | | TG | [SEQ ID | TGTATGCTGT | UG | [SEQ ID | UGUAUGCUGU |
| | | | | [SEQ ID | NO: | CGGGTTGAAA | [SEQ ID | NO: | CGGGUUGAAA |
| | | | | NO: | 1676] | TCTGAAGTGT | NO: | 1871] | UCUGAAGUGU |
| | | | | 657] | | GTTTTGGCCA | 1185] | | GUUUUGGCCA |
| | | | | | | CTGACTGACA | | | CUGACUGACA |
| | | | | | | CACTTCGATT | | | CACUUCGAUU |
| | | | | | | CAACCCGACA | | | CAACCCGACA |
| | | | | | | GGACACAAGG | | | GGACACAAGG |
| | | | | | | CCTGTTACTA | | | CCUGUUACUA |
| | | | | | | GCACTCACAT | | | GCACUCACAU |
| | | | | | | GGAACAAATG | | | GGAACAAAUG |
| | | | | | | GCCACCGG | | | GCCACCGG |
| | | | | | | [SEQ ID | | | [SEQ ID |
| | | | | | | NO: | | | NO: |
| | | | | | | 2192] | | | 2193] |
| miR | 1162 | −1.86763 | −0.12823 | AACTGTACCA | CAGACTTTTT | CCTGGAGGCT | AACUGUACCA | CAGACUUUUU | CCUGGAGGCU |
| 155-M | | | | CAACAAAGTC | GGGTACAGTT | TGCTGAAGGC | CAACAAAGUC | GGGUACAGUU | UGCUGAAGGC |
| | | | | TG | [SEQ ID | TGTATGCTGA | UG | [SEQ ID | UGUAUGCUGA |
| | | | | [SEQ ID | NO: | ACTGTACCAC | [SEQ ID | NO: | ACUGUACCAC |
| | | | | NO: | 1706] | AACAAAGTCT | NO: | 1905] | AACAAAGUCU |
| | | | | 652] | | GTTTTGGCCA | 1180] | | GUUUUGGCCA |
| | | | | | | CTGACTGACA | | | CUGACUGACA |
| | | | | | | GACTTTTTGG | | | GACUUUUUGG |
| | | | | | | GTACAGTTCA | | | GUACAGUUCA |
| | | | | | | GGACACAAGG | | | GGACACAAGG |
| | | | | | | CCTGTTACTA | | | CCUGUUACUA |
| | | | | | | GCACTCACAT | | | GCACUCACAU |
| | | | | | | GGAA | | | GGAACAAAUG |
| | | | | | | CAAATGGCCA | | | GCCACCGG |
| | | | | | | CCGG | | | [SEQ ID |
| | | | | | | [SEQ ID | | | NO: |
| | | | | | | NO: | | | 2195] |
| | | | | | | 2194] | | | |
| miR | 1580 | −1.73791 | −0.21175 | ACTGGAATTT | AGCAGTTCGA | CCTGGAGGCT | ACUGGAAUUU | AGCAGUUCGA | CCUGGAGGCU |
| 155-M | | | | CTCTGAACTG | GAATTCCAGT | TGCTGAAGGC | CUCUGAACUG | GAAUUCCAGU | UGCUGAAGGC |
| | | | | CT | [SEQ ID | TGTATGCTGA | CU | [SEQ ID | UGUAUGCUGA |
| | | | | [SEQ ID | NO: | CTGGAATTTC | [SEQ ID | NO: | CUGGAAUUUC |
| | | | | NO: | 2171] | TCTGAACTGC | NO: | 2173] | UCUGAACUGC |
| | | | | 1622] | | TTTTTGGCCA | 1817] | | UUUUUGGCCA |
| | | | | | | CTGACTGAAG | | | CUGACUGAAG |
| | | | | | | CAGTTCGAGA | | | CAGUUCGAGA |
| | | | | | | ATTCCAGTCA | | | AUUCCAGUCA |
| | | | | | | GGACACAAGG | | | GGACACAAGG |
| | | | | | | CCTGTTACTA | | | CCUGUUACUA |
| | | | | | | GCACTCACAT | | | GCACUCACAU |
| | | | | | | GGAACAAATG | | | GGAACAAAUG |
| | | | | | | GCCACCGG | | | GCCACCGG |
| | | | | | | [SEQ ID | | | [SEQ ID |
| | | | | | | NO: | | | NO: |
| | | | | | | 2196] | | | 2197] |
| miR | 3273 | −1.30321 | −0.03402 | TAGGACTGTA | CAATATGTGC | CCTGGAGGCT | UAGGACUGUA | CAAUAUGUGC | CCUGGAGGCU |
| 155-M | | | | GGCAACATAT | CACAGTCCTA | TGCTGAAGGC | GGCAACAUAU | CACAGUCCUA | UGCUGAAGGC |
| | | | | TG | [SEQ ID | TGTATGCTGT | UG | [SEQ ID | UGUAUGCUGU |
| | | | | [SEQ ID | NO: | AGGACTGTAG | [SEQ ID | NO: | AGGACUGUAG |
| | | | | NO: | 1683] | GCAACATATT | NO: | 1878] | GCAACAUAUU |
| | | | | 1628] | | GTTTTGGCCA | 1821] | | GUUUUGGCCA |
| | | | | | | CTGACTGACA | | | CUGACUGACA |
| | | | | | | ATATGTGCCA | | | AUAUGUGCCA |
| | | | | | | CAGTCCTACA | | | CAGUCCUACA |
| | | | | | | GGACACAAGG | | | GGACACAAGG |
| | | | | | | CCTGTTACTA | | | CCUGUUACUA |
| | | | | | | GCACTCACAT | | | GCACUCACAU |
| | | | | | | GGAACAAATG | | | GGAACAAAUG |
| | | | | | | GCCACCGG | | | GCCACCGG |
| | | | | | | [SEQ ID | | | [SEQ ID |
| | | | | | | NO: | | | NO: |
| | | | | | | 2198] | | | 2199] |
| miR | 3291 | −1.28366 | 0.074799 | TCTGATTTGG | CCTCAGCATT | CCTGGAGGCT | UCUGAUUUGG | CCUCAGCAUU | CCUGGAGGCU |
| 155-M | | | | GAACTGCTGA | CCAAATCAGA | TGCTGAAGGC | GAACUGCUGA | CCAAAUCAGA | UGCUGAAGGC |
| | | | | GG | [SEQ ID | TGTATGCTGT | GG | [SEQ ID | UGUAUGCUGU |
| | | | | [SEQ ID | NO: | CTGATTTGGG | [SEQ ID | NO: | CUGAUUUGGG |
| | | | | NO: | 2201] | AACTGCTGAG | NO: | 2204] | AACUGCUGAG |
| | | | | 2200] | | GTTTTGGCCA | 2203] | | GUUUUGGCCA |
| | | | | | | CTGACTGACC | | | CUGACUGACC |
| | | | | | | TCAGCATTCC | | | UCAGCAUUCC |
| | | | | | | AAATCAGACA | | | AAAUCAGACA |
| | | | | | | GGACACAAGG | | | GGACACAAGG |
| | | | | | | CCTGTTACTA | | | CCUGUUACUA |
| | | | | | | GCACTCACAT | | | GCACUCACAU |
| | | | | | | GGA | | | GGAACAAAUG |
| | | | | | | ACAAATGGCC | | | GCCACCGG |
| | | | | | | ACCGG | | | [SEQ ID |
| | | | | | | [SEQ ID | | | NO: |
| | | | | | | NO: | | | 2205] |
| | | | | | | 2202] | | | |
| miR | 2914 | −1.18865 | 0.250219 | TGTGGGTTGA | ATGCAAAGAG | CCTGGAGGCT | UGUGGGUUGA | AUGCAAAGAG | CCUGGAGGCU |
| 155-M | | | | ACTCCTTTGC | TCAACCCACA | TGCTGAAGGC | ACUCCUUUGC | UCAACCCACA | UGCUGAAGGC |
| | | | | AT | [SEQ ID | TGTATGCTGT | AU | [SEQ ID | UGUAUGCUGU |
| | | | | [SEQ ID | NO: | GTGGGTTGAA | [SEQ ID | NO: | GUGGGUUGAA |
| | | | | NO: | 2207] | CTCCTTTGCA | NO: | 2210] | CUCCUUUGCA |
| | | | | 2206] | | TTTTTGGCCA | 2209] | | UUUUUGGCCA |
| | | | | | | CTGACTGAAT | | | CUGACUGAAU |
| | | | | | | GCAAAGAGTC | | | GCAAAGAGUC |
| | | | | | | AACCCACACA | | | AACCCACACA |
| | | | | | | GGACACAAGG | | | GGACACAAGG |
| | | | | | | CCTGTTACTA | | | CCUGUUACUA |
| | | | | | | GCACTCACAT | | | GCACUCACAU |
| | | | | | | GGAACAAATG | | | GGAACAAAUG |
| | | | | | | GCCACCGG | | | GCCACCGG |
| | | | | | | [SEQ ID | | | [SEQ ID |
| | | | | | | NO: | | | NO: |
| | | | | | | 2208] | | | 2211] |

### Methods

### Oligo Pool Design and Synthesis:

[0436] A total of 7500 elements of 210 bp length were designed for synthesis, split approximately evenly across 20 miRNA backbones. There were more elements in the miR-1-1, miR-155, and miR-16-2 backbones as elements that had been tested in arrayed experiments were also included in this screen. ATXN2 targeting sequences accounted for about 60% of the library.

[0437] Each element included the 138 nt pri-miRNA, flanked by dual 18 nt adapter pairs. The outer adapter pair was miR-specific and the inside adapter pair was universal.

### Full DS2 Library Cloning Strategy

[0438] Oligonucleotide pools were synthesized (Twist Bioscience) and were reconstituted in nuclease free water. For cloning the EF1A oligo pool into pLVX_EF1A-MCS-WPRE-CMV-Puro, the vector was first linearized by XbaI and EcoRI restriction digest and gel purified. The primers DS2_EF1A_fw and DS2_EF1A_rv were used to amplify the oligo pool through 10 cycles of PCR and purified. The purified pooled insert and purified linearized vector were assembled with NEB HiFi assembly, precipitated, concentrated, and electroporated into Lucigen Endura electrocompetent cells, recovered and maxiprepped. Oligo pools were PCR amplified with the following conditions.

[0439] The PCR mix consisted of:

| Component | Volume (ul) |
|---|---|
| NEBNext 2 × mix (M0541L) | 50 |
| DMSO (D9170-5VL) | 2 |
| Betaine (Sigma, B0300-1VL) | 10 |
| 100uM FW primer | 0.5 |
| (DS2_EF1A_fw) | |
| 100uM RV primer | 0.5 |
| (DS2_EF1A_rv) | |
| 1ng EF1A oligo pool in | 37 |
| nuclease free water | |
| Total | 100 |

[0440] The PCR cycling parameters were:

| STEP | TEMP | TIME | |
|---|---|---|---|
| Initial Denaturation | 98° C. | 30 | s |
| 10 cycles | 98° C. | 10 | s |
| | 64° C. | 30 | s |
| | 72° C. | 15 | s |
| Final Extension | 72° C. | 2 | min |
| Hold | 4-10° C. | | |

[0441] PCR products of 210 bp length were purified by agarose gel extraction (Zymoclean gel DNA recovery kit, D4002). Agilent Tapestation High Sensitivity D1000 was used to quantify the molarity of the 210 bp peak and to confirm removal of contaminating bands.

[0442] HiFi assembly of the pooled library was performed by assembling at 5 to 1 insert to backbone molar ratio. 15 ul of 2×HiFi assembly master mix (NEB, E2621L) and 15 ul of insert and backbone (about 0.375 pmol purified miR library insert to 0.075 pmol purified backbone) and incubating for 1 hr at 50° C.

[0443] Assembled DNA was precipitated by adding 1 ul of 20 mg/mL glycogen, one-tenth volume of 3M sodium acetate pH 5.5, and 2.2× volume of ethanol, mixed and stored overnight at −80° C.

[0444] Samples were spun at 16,000×g for 15 min at 4° C. Supernatant was removed and discarded. Pellets were washed twice with 1 ml of 70% ice cold ethanol and let to dry, then dissolved in 4 ul nuclease free water.

[0445] Purified DNA and 0.1 cm Gene Pulser Cuvettes (Bio-rad, 165-2089) were placed on ice for 10 min. 50 ul of Lucigen Endura electrocompetent cells were thawed briefly on ice. 4 ul of precipitated HiFi reaction was added to 25 ul of electrocompetent cells, mixed, and transferred to the cuvette. DNA and cell mixes were electroporated with the following parameters: 1800 Volts, 10 uF, 600 Ohms, 0.1 cm cuvette. Cuvettes were immediately flushed twice with 1 mL Lucigen recovery media. Cells were recovered at 37° C. for 1 hour at 230 rpm.

[0446] To titer the transformed bacteria, 2 uL of each culture was diluted into 200 uL of LB and 100 ul or 10 ul of this plated at a 1:100 dilution onto LB agar plates plus appropriate antibiotic. The number of colonies were counted the next day to determine total number of transformants.

[0447] Liquid cultures were inoculated into the appropriate amount of LB with antibiotic for maxi prep. Pooled plasmid libraries were prepared with a Qiagen Plasmid Maxi Kit following the manufacturer's instructions.

### Preparation and Titering of Pooled EF1A Library

[0448] Lentivirus was produced with the Takara packaging plasmid system in Lenti-X 293T cells. Functional titers were determined by Cell Titer Glo following infection and puromycin selection for 3 days to identify conditions to achieve MOI=0.1.

### Execution of Full Library Screens for Atxn2 Levels and Dropout

[0449] Concurrent ATXN2 levels and dropout screens were conducted similarly to DS1. U2OS cells were infected at day 0 with the lentiviral pooled EF1A library at 2000× coverage and MOI=0.1.

[0450] For the dropout screen, a T0 baseline sample was collected at day 1. Puromycin was added on day 2 and MOI was confirmed by plating cells for Cell Titer Glo titer assessment at day 5. After day 7, puromycin was removed and cells were passaged at a minimum of 20 million cells to day 18, upon which the T1 final cell population was collected.

[0451] For the ATXN2 protein levels screen, on day 7 cells were harvested and fixed in 6% sucrose/8% PFA for 10-15 min at room temperature, centrifuged 600×g for 3 minutes, washed thrice using the permeabilization buffer (eBioscience, 00-5523-00), mixed with wash buffer and incubated for 15-20 min at room temperature. Anti-ATXN2 primary antibody (1:200, BD, 611378) was incubated for 30-60 min at RT. Cells were washed thrice and AF647 secondary (1:200, Biolegend, 405322) was added and incubated for 45 min. After three washes, cells were resuspended in FACS buffer and sorted on a BD FACSAria Fusion. After gating for singlets, 25% high and low Atxn2 gates were drawn, adjusting for cell size by sorting on an APC/SSC ratiometric gate. Once 3-3.5 million cells were collected for the 25% high and low sort gates, remaining cells were sorted on a 10% low gate (1 million cells collected) to further enrich for high performing guides. The reference population was collected by sorting for singlets.

[0452] Fixed populations of sorted cells were decrosslinked with 1% SDS/1% sodium bicarbonate and incubated overnight at 65 C. Genomic DNA was extracted with Machery Nagel NucleoSpin L kit and proceeded to nested PCR to prepare sequencing libraries.

### Sequencing Library Preparation

[0453] Nested PCR was performed to produce Illumina adapted sequencing amplicons. The first PCR reaction was performed on all genomic DNA extracted from each cell pellet. A maximum of 5 ug genomic DNA was used per 100 ul PCR reaction using the conditions listed below.

| Component | Volume (ul) |
|---|---|
| NEBNext 2 × mix (M0541L) | 50 |
| DMSO (D9170-5VL) | 2 |
| Betaine (Sigma, B0300-1VL) | 10 |
| 100uM FW primer | 0.5 |
| (EF1A_F_intron) | |
| 100uM RV primer (WPRE_R_ CG) | 0.5 |
| 5ug genomic DNA and nuclease | 37 |
| free water | |
| Total | 100 |

| STEP | TEMP | | TIME | |
|---|---|---|---|---|
| Initial Denaturation | 98° | C. | 30 | s |
| 20 cycles | 98° | C. | 10 | s |
| | 64 | C. | 30 | s |
| | 72° | C. | 20 | s |
| Final Extension | 72° | C. | 2 | minutes |
| Hold | 4-10° | C. | | |

[0454] Following PCR, all reactions from a given sample were consolidated into a single tube.

[0455] Bead purification of the first PCR product of 564 bp expected size was performed with 0.5× and 0.9× double sided SPRI bead ratios. Specifically, 25 ul of SPRIselect (Beckman, B23318) was added to 50 ul first PCR product, mixed well by pipetting, and incubated at room temperature for 10 min. Samples were placed on a magnetic stand for 5 min. The supernatant was transferred to a new tube. 45 ul SPRIselect was added to the transferred supernatant, mixed well by pipetting, and incubated at room temperature for 10 min. Samples were placed on a magnetic stand for 5 min. Supernatant was then removed. Beads were washed twice with 1 ml fresh 80% ethanol over 2 min incubations. Beads with bound DNA were air dried for 5-10 min and eluted with 20 ul elution buffer from the Machery Nagel kit.

[0456] A second PCR was performed to add sample barcodes and Illumina adapters with the following conditions:

| Component | Volume (ul) |
|---|---|
| NEBNext 2 × mix (M0541L) | 50 |
| DMSO (D9170-5VL) | 2 |
| Betaine (Sigma, B0300-1VL) | 10 |
| 100uM FW primer (P5-DS2-FW) | 0.5 |
| 100uM RV primer | 0.5 |
| (RV primer P7-DS2-RV-1 to 12 for | |
| multiplexing onto MiSeq run) | |
| 1^{st} PCR bead purification product | 5 |
| Nuclease free water | 32 |
| Total | 100 |

| STEP | TEMP | | TIME | |
|---|---|---|---|---|
| Initial Denaturation | 98° | C. | 30 | s |
| 10 cycles | 98° | C. | 10 | s |
| | 64 | C | 30 | s |
| | 72° | C. | 20 | s |
| Final Extension | 72° | C. | 2 | minutes |
| Hold | 4-10° | C. | | |

[0457] Bead purification of the second PCR product with 300 bp expected size was performed with 0.7× and 1.2× double sided SPRI bead ratios. Specifically, 35 ul of SPRIselect (Beckman, B23318) was added to 50 ul first PCR product, mixed well by pipetting, and incubated at room temperature for 10 min. Samples were placed on a magnetic stand for 5 min. The supernatant was transferred to a new tube. 60 ul SPRIselect was added to the transferred supernatant, mixed well by pipetting, and incubated at room temperature for 10 min. Samples were placed on a magnetic stand for 5 min. Supernatant was then removed. Beads were washed twice with 1 ml fresh 80% ethanol over 2 min incubations. Beads with bound DNA were air dried for 5-10 min and eluted with 20 ul elution buffer from the Machery Nagel kit.

[0458] Final bead purified 2^{nd} PCR product was quantified by Tapestation High Sensitivity D1000 (Agilent) and multiplexed at equimolar ratio for sequencing on a MiSeq (Illumina). Using manufacturer's protocols, 15 pM libraries were denatured and mixed with 2% PhiX control. DS2-EF1A-READ1 primer was spiked into position 12 of the MiSeq v3 cartridge (Illumina). Read 1 was set to 139 cycles and index reads was set to 6 cycles.

[0459] Data were demultiplexed using the fastq generation module and analyzed.

### Primers

| Name | Sequence |
|---|---|
| WPRE_R_CG | Catagcgtaaaaggagcaaca |
| | (SEQ ID NO: 628) |
| EF1A_F_ | Ccaggcacctcgattagttc |
| intron | (SEQ ID NO: 2212) |
| DS2-EF1A- | AAGTAAGcctgcaggAATTgCCTAGGgt |
| READ1 | (SEQ ID NO: 2213) |
| P5-DS2-FW | aatgatacggcgaccaccgagatctaca |
| | cAAGTAAGcctgcaggAATTgCCTAGGg |
| | t |
| | (SEQ ID NO: 2214) |
| P7-DS2- | CAAGCAGAAGACGGCATACGAGATCTTG |
| RV_1 | TAGTGACTGGAGTTCAGACGTGTGCTCT |
| | TCCGATCTACATGtctcgacctggctta |
| | ctagtG |
| | (SEQ ID NO: 2215) |
| P7-DS2- | CAAGCAGAAGACGGCATACGAGATGCCA |
| RV_2 | ATGTGACTGGAGTTCAGACGTGTGCTCT |
| | TCCGATCTACATGtctcgacctggctta |
| | ctagtG |
| | (SEQ ID NO: 2216) |
| P7-DS2- | CAAGCAGAAGACGGCATACGAGATAGTT |
| RV_3 | CCGTGACTGGAGTTCAGACGTGTGCTCT |
| | TCCGATCTACATGtctcgacctggctta |
| | ctagtG |
| | (SEQ ID NO: 2217) |
| P7-DS2- | CAAGCAGAAGACGGCATACGAGATTAGC |
| RV_4 | TTGTGACTGGAGTTCAGACGTGTGCTCT |
| | TCCGATCTACATGtctcgacctggctta |
| | ctagtG |
| | (SEQ ID NO: 2218) |
| P7-DS2- | CAAGCAGAAGACGGCATACGAGATTTAG |
| RV_5 | GCGTGACTGGAGTTCAGACGTGTGCTCT |
| | TCCGATCTACATGtctcgacctggctta |
| | ctagtG |
| | (SEQ ID NO: 2219) |
| P7-DS2- | CAAGCAGAAGACGGCATACGAGATATCA |
| RV_6 | CGGTGACTGGAGTTCAGACGTGTGCTCT |
| | TCCGATCTACATGtctcgacctggctta |
| | ctagtG |
| | (SEQ ID NO: 2220) |
| P7-DS2- | CAAGCAGAAGACGGCATACGAGATGAGT |
| RV_7 | GGGTGACTGGAGTTCAGACGTGTGCTCT |
| | TCCGATCTACATGtctcgacctggctta |
| | ctagtG |
| | (SEQ ID NO: 2221) |
| P7-DS2- | CAAGCAGAAGACGGCATACGAGATAGTC |
| RV_8 | AAGTGACTGGAGTTCAGACGTGTGCTCT |
| | TCCGATCTACATGtctcgacctggctta |
| | ctagtG |
| | (SEQ ID NO: 2222) |
| P7-DS2- | CAAGCAGAAGACGGCATACGAGATACAG |
| RV_9 | TGGTGACTGGAGTTCAGACGTGTGCTCT |
| | TCCGATCTACATGtctcgacctggctta |
| | ctagtG |
| | (SEQ ID NO: 2223) |
| P7-DS2- | CAAGCAGAAGACGGCATACGAGATTGAC |
| RV_10 | CAGTGACTGGAGTTCAGACGTGTGCTCT |
| | TCCGATCTACATGtctcgacctggctta |
| | ctagtG |
| | (SEQ ID NO: 2224) |
| P7-DS2- | CAAGCAGAAGACGGCATACGAGATCAGA |
| RV_11 | TCGTGACTGGAGTTCAGACGTGTGCTCT |
| | TCCGATCTACATGtctcgacctggctta |
| | ctagtG |
| | (SEQ ID NO: 2225) |
| P7-DS2- | CAAGCAGAAGACGGCATACGAGATGGCT |
| RV_12 | ACGTGACTGGAGTTCAGACGTGTGCTCT |
| | TCCGATCTACATGtctcgacctggctta |
| | ctagtG |
| | (SEQ ID NO: 2226) |

### Example 6: Evaluation of miR Backbones in AAV Plasmids

[0461] A subset of these miR backbones were subsequently evaluated in cis plasmids for AAV production. As described in Example 4 for AAV packaging of miR-16-2 backbone containing amiRNA vectors, cis plasmids containing an H1 promoter (nucleotides 113-203 of SEQ ID NO:1522) and a stuffer sequence (“AMELY_ITR_Stuffer_V1”—nucleotides 348-2228 of SEQ ID NO:1522) and various miR backbones were used to package AAV, and then the uniformity of vector genomes produced was assessed by agarose gel electrophoresis. SEQ ID NO:1522 provides an example of such a sequence from 5′ ITR to 3′ ITR, where for each library element the plasmid would be as shown but with the bases denoted with ‘n’ in the miR backbone insert (nucleotides 204-341 of SEQ ID NO:1522) replaced by the appropriate 138-bp artificial miRNA sequence (backbone, guide, and passenger insert. FIG. 35 shows the indicated set of AAVs, with indicated ATXN2 guide sequence (targeting position 4402 in ATXN2 transcript, —SEQ ID NO:1279 (RNA)), and overall miR cassette sequences constructed from the rules in Table 8. Among the miR backbones assessed, miR-100 and miR-128 backbone-embedded miRs had more uniform gel patterns. To more generally assess the vector integrity of AAV containing different miR backbones, libraries of cis plasmids, each containing the complete set of ATXN2 targeting amiRNA guide sequences as in Deep Screen 2, were used to package AAV as before. The oligonucleotide amplification strategy used in this experiment does not distinguish between parent and “_M” forms of the miR backbones where both were originally present in the Deep Screen 2 library, so the libraries include mixtures of, for example, miR-100 and miR-100_M backbone containing elements; miR-1-1 and mir-1-1_M backbones. FIG. 36 shows that, as with AAVs containing a miR-100 backbone and the specific guide sequence 4402 (SEQ ID NO:751 (DNA); SEQ ID NO:1279 (RNA)), AAVs derived from a library of miRs embedded in the miR-100 and miR-100_M backbones exhibit a more uniform gel electrophoresis pattern than AAVs with other miR backbones. Although the specific composition of the cis plasmid libraries was not assessed after packaging and confirmed to be consistent across libraries with different miR backbones, the simplest interpretation of this data is that on average, across a range of specific miRs, AAV vector genomes with a miR-100 backbone exhibit more uniform, full-length size, than other backbones.

[0462] Based on the combined properties of good knockdown performance and good AAV vector genome uniformity, miR-100 and the slightly modified miR-100_M were prioritized as backbones for advancement. ‘Micropool’ plasmid libraries comprising amiRNAs inserted into unpackaged AAV cis plasmid scAAV_AMELY_V1_H1 (SEQ ID NO:1522; amiRNA insert located at nucleotides 204-341) were tested by transfecting plasmid library into HEK293T cells and harvesting small RNA. As above the oligonucleotide amplification strategy to construct the plasmid library did not distinguish between the miR100 and miR100_M backbones, and so the library represents a mix of both; however, given the similar performance overall of miRs from parent and _M form backbones, the mix of backbones in the library is unlikely to degrade the overall ability to detect precisely processed miRNAs. This small RNAseq data was integrated to evaluate processing precision of individual amiRNAs within the library, as in the below examples.

### Methods

### AAV Micropool Cloning

[0463] To clone micropools into the scAAV_AMELY_V1_H1 backbone (to yield plasmids as set forth in SEQ ID NO:1522), the backbone was first linearized by AarI digestion of a cloning site region and agarose gel purified.

[0464] Micropools were amplified using the following conditions, using miR-1-1 as an example. All miRNA backbone specific primer pairs are listed in the table below.

| Component | Volume (ul) | | | |
|---|---|---|---|---|
| NEBNext 2 × mix (M0541L) | 50 | | | |
| DMSO (D9170-5VL) | 2 | | | |
| Betaine (Sigma, B0300-1VL) | 10 | | | |
| 100uM FW primer (miR-1-1- | 0.5 | | | |
| AAV-H1-AMELY-V1-AarI- | | | | |
| FW) | | | | |
| 100uM RV primer (miR-1-1- | 0.5 | | | |
| AAV-H1-AMELY-V1-AarI- | | | | |
| RV) | | | | |
| 1ng EF1A oligo pool from | 37 | | | |
| Twist and nuclease free water | | | | |
| Total | 100 | | | |
| STEP | TEMP | | TIME | |
| Initial Denaturation | 98° | C. | 30 | s |
| 20 cycles | 98° | C. | 10 | s |
| | 64 | C | 30 | s |
| | 72° | C. | 15 | s |
| Final Extension | 72° | C. | 2 | minutes |
| Hold | 4-10° | C. | | |

[0465] Double sided bead purification with 0.7×SPRI beads and 1.2×SPRI beads ratios was used on the PCR product, which was in turn used as the insert in the HiFi assembly.

[0466] HiFi assembly of the pooled library was performed by assembling at 5 to 1 insert to backbone molar ratio. 15 ul of 2×HiFi assembly master mix (NEB, E2621L) and 15 ul of insert and backbone (about 0.375 pmol purified miR library insert to 0.075 pmol purified backbone) and incubating for 1 hr at 50° C.

[0467] Assembled DNA was precipitated by adding 1 ul of 20 mg/mL glycogen, one-tenth volume of 3M sodium acetate pH 5.5, and 2.2× volume of ethanol, mixed and stored overnight at −80° C.

[0468] Samples were spun at 16,000×g for 15 min at 4° C. Supernatant was removed and discarded. Pellets were washed twice with 1 ml of 70% ice cold ethanol and let to dry, then dissolved in 4 ul nuclease free water.

[0469] Purified DNA and 0.1 cm Gene Pulser Cuvettes (Bio-rad, 165-2089) were placed on ice for 10 min. 50 ul of Lucigen Endura electrocompetent cells were thawed briefly on ice. 4 ul of precipitated HiFi reaction was added to 25 ul of electrocompetent cells, mixed, and transferred to the cuvette. DNA and cell mixes were electroporated with the following parameters: 1800 Volts, 10 uF, 600 Ohms, 0.1 cm cuvette. Cuvettes were immediately flushed 2× with 1 mL Lucigen recovery media. Cells were recovered at 37° C. for 1 hour at 230 rpm.

[0470] To titer the transformed bacteria, 2 uL of each culture was diluted into 200 uL of LB and plated 100 ul and 10 ul of this 1:100 dilution onto LB agar plates plus appropriate antibiotic. The number of colonies were counted the next day to determine total number of transformants.

[0471] Liquid cultures were inoculated into the appropriate amount of LB with antibiotic for maxi prep. Pooled plasmid libraries were prepared with a Qiagen Plasmid Maxi Kit following the manufacturer's instructions.

### Primers

| Name | Sequence |
|---|---|
| miR-1-1- | Taagttctgtatgagaccaccatgcagactg |
| AAV-H1- | cctgctTGG |
| AMELY-V1- | (SEQ ID NO: 2227) |
| AarI-FW | |
| miR-100- | taagttctgtatgagaccacCCCAAAAGAGA |
| AAV-H1- | GAAGATATT |
| AMELY-V1- | (SEQ ID NO: 2228) |
| AarI-FW | |
| miR-124- | taagttctgtatgagaccacTTCCTTCCTCA |
| AAV-H1- | GGAGAAAGG |
| AMELY-V1- | (SEQ ID NO: 2229) |
| AarI-FW | |
| miR-128- | taagttctgtatgagaccacATTTtgcaata |
| AAV-H1- | attggcctt |
| AMELY-V1- | (SEQ ID NO: 2230) |
| AarI-FW | |
| miR-122- | taagttctgtatgagaccacggctacagagt |
| AAV-H1- | ttCCTTAGC |
| AMELY-V1- | (SEQ ID NO: 2231) |
| AarI-FW | |
| miR-130a- | taagttctgtatgagaccacgcagggccggc |
| AAV-H1- | atgcctcTG |
| AMELY-V1- | (SEQ ID NO: 2232) |
| AarI-FW | |
| miR-132- | taagttctgtatgagaccacGCCGTCCGCGC |
| AAV-H1- | GCCCCGCCC |
| AMELY-V1- | (SEQ ID NO: 2233) |
| AarI-FW | |
| miR-138- | taagttctgtatgagaccacgccggcggagt |
| 2-AAV-H1- | tctggtatC |
| AMELY-V1- | (SEQ ID NO: 2234) |
| AarI-FW | |
| miR-144- | taagttctgtatgagaccacTCAAGCCATGC |
| AAV-H1- | TTCCTGTGC |
| AMELY-V1- | (SEQ ID NO: 2235) |
| AarI-FW | |
| miR-155- | taagttctgtatgagaccacCCTGGAGGCTT |
| M-AAV-H1- | GCTGAAGGC |
| AMELY-V1- | (SEQ ID NO: 2236) |
| AarI-FW | |
| miR-155E- | taagttctgtatgagaccacCTGGAGGCTTG |
| AAV-H1- | CTTTGGGCT |
| AMELY-V1- | (SEQ ID NO: 2237) |
| AarI-FW | |
| miR-16-2- | taagttctgtatgagaccacTTATGTTTGGA |
| AAV-H1- | TGAACTGAC |
| AMELY-V1- | (SEQ ID NO: 2238) |
| AarI-FW | |
| miR-190a- | taagttctgtatgagaccacGAGCTCAGTCA |
| AAV-H1- | AACCTGGAT |
| AMELY-V1- | (SEQ ID NO: 2239) |
| AarI-FW | |
| miR-223- | taagttctgtatgagaccacTCCCCACAGAA |
| AAV-H1- | GCTCTTGGC |
| AMELY-V1- | (SEQ ID NO: 2240) |
| AarI-FW | |
| miR-451a- | taagttctgtatgagaccacGCTCTCTGCTC |
| AAV-H1- | AGCCTGTCA |
| AMELY-V1- | (SEQ ID NO: 2241) |
| AarI-FW | |
| miR-1-1- | TATGTGATATGCATAATAaaaaaaggccccc |
| AAV-H1- | gtggtgtggagtg |
| AMELY-V1- | (SEQ ID NO: 2242) |
| AarI-RV | |
| miR-100- | TATGTGATATGCATAATAaaaaaaGGCATAT |
| AAV-H1- | AAGCAAAGCCCCA |
| AMELY-V1- | (SEQ ID NO: 2243) |
| AarI-RV | |
| miR-124- | TATGTGATATGCATAATAaaaaaatcctTGG |
| AAV-H1- | CGGGCCCTCGCCG |
| AMELY-V1- | (SEQ ID NO: 2244) |
| AarI-RV | |
| miR-128- | TATGTGATATGCATAATAaaaaaaagcagtg |
| AAV-H1- | gaaacctgagtaa |
| AMELY-V1- | (SEQ ID NO: 2245) |
| AarI-RV | |
| miR-122- | TATGTGATATGCATAATAaaaaaacaaagca |
| AAV-H1- | aacgatgccaaga |
| AMELY-V1- | (SEQ ID NO: 2246) |
| AarI-RV | |
| miR-130a- | TATGTGATATGCATAATAaaaaaacaatgct |
| AAV-H1- | gaggaggcagcca |
| AMELY-V1- | (SEQ ID NO: 2247) |
| AarI-RV | |
| miR-132- | TATGTGATATGCATAATAaaaaaaGGCTCGG |
| AAV-H1- | GGCGCGGCGTGGC |
| AMELY-V1- | (SEQ ID NO: 2248) |
| AarI-RV | |
| miR-138- | TATGTGATATGCATAATAaaaaaaCCggtcc |
| 2-AAV-H1- | cacgaggctcgcc |
| AMELY-V1- | (SEQ ID NO: 2249) |
| AarI-RV | |
| miR-144- | TATGTGATATGCATAATAaaaaaatgtccTC |
| AAV-H1- | CTTGTCAGGCTCC |
| AMELY-V1- | (SEQ ID NO: 2250) |
| AarI-RV | |
| miR-155- | TATGTGATATGCATAATAaaaaaaCCGGTGG |
| M-AAV-H1- | CCATTTGTTCCAT |
| AMELY-V1- | (SEQ ID NO: 2251) |
| AarI-RV | |
| miR-155E- | TATGTGATATGCATAATAaaaaaaCCCACGG |
| AAV-H1- | TGGCCATTTGTTC |
| AMELY-V1- | (SEQ ID NO: 2252) |
| AarI-RV | |
| miR-16-2- | TATGTGATATGCATAATAaaaaaaAAACAAT |
| AAV-H1- | TGATAAAATAGTT |
| AMELY-V1- | (SEQ ID NO: 2253) |
| AarI-RV | |
| miR-190a- | TATGTGATATGCATAATAaaaaaaCTTTATT |
| AAV-H1- | AGGAACCCCCGGA |
| AMELY-V1- | (SEQ ID NO: 2254) |
| AarI-RV | |
| miR-223- | TATGTGATATGCATAATAaaaaaaGGCCTAG |
| AAV-H1- | AGCTGGTAAGCAT |
| AMELY-V1- | (SEQ ID NO: 2255) |
| AarI-RV | |
| miR-451a- | TATGTGATATGCATAATAaaaaaaCTGAGTT |
| AAV-H1- | CTCTTCCTGGCAC |
| AMELY-V1- | (SEQ ID NO: 2256) |
| AarI-RV | |

### Pooled AAV Production

[0473] AAV micropools served as cis-plasmids to package with Ad helper and AAV9 RepCap using standard three plasmid AAV packaging methods at Vector BioLabs.

### Crude Lysate Processing and Gel Visualization

[0474] To extract vector genomes, crude lysates underwent 4 freeze thaw cycles (37° C. and dry ice-ethanol bath) and were passed through a 0.45 um filter (Chemglass, CLS-2005-017). Each 100 ul of passthrough was treated with 2 ul DNAse 1 (NEB, M0303L) and 0.2 ul RNAse A (ThermoScientific, EN0531) for 30 min at 37° C. Vector genomes were extracted with the Quick Viral DNA kit (Zymo, D3015). 1.5% agarose gels with either SYBRsafe or SYBRgold to stain DNA were used for visualization.

### Pooled Expression of Micropools for Small RNAseq

[0475] Micropools of miR100 and miR100_M backbone miRs, embedded in the plasmid scAAV_AMELY_V1_H1, were transfected into HEK293 cells using a lipid based method (Lipofectamine LTX, ThermoFisher) in cells grown in 6 well plates. 600,000 cells were seeded per well and were transfected the following day in duplicate, with 2.5 micrograms of micropool library transfected per well. Media was changed at day 2 and collected in Trizol at day 3. Total RNA was extracted by chloroform phase separation and purification by Zymo Direct-zol column elution using manufacturer's protocols.

### Small RNAseq

[0476] Small RNAseq libraries were prepared using the Nextflex v3 small RNA seq kit (Bioo Scientific Corp, NOVA-5132-05). Briefly, library preparation was initiated with 0.5-2 ug of RNA input. 14-18 cycles of PCR were performed for each sample. Two rounds of double-sided bead cleanup were performed prior to pooling samples based on Tapestation High Sensitivity D1000 quantitation of the 150 bp band. Illumina adapted libraries were multiplexed and loaded onto a MiSeq (Illumina), loading the library at 9 pM with 10% phiX on a MiSeq v3 kit and with read 1 set to 75 cycles and index set to 6 cycles.

### Example 7: Ranking of Top Artificial miRNAs Embedded in miR-100 and miR-100 M Backbones

[0477] Top amiRNAs embedded in miR-100 and miR-100_M backbones were ranked by knockdown performance in Deep Screen 2; by guide to passenger ratio; and by minimal depletion at late (T₁, 18 day) versus early (T₀) timepoints (dropout). (Noting, as above, that the guide:passenger ratios are from a small RNAseq library including a mix of miR100 and miR100_M backbones). Additionally, the set of potential off-target transcripts with 1 or 2 bp mismatches was assessed for each ranked candidate. After eliminating candidates with low guide:passenger ratios, low T₁/T₀ ratios, and candidates with CNS expressed transcripts with near-complementarity of only 1 bp mismatch, a set of 9 active miRNAs, and 2 911 control miRNAs, were cloned into cis plasmids downstream of an H1 promoter, and packaged with a Rep/Cap helper plasmid encoding for AAV-DJ capsid components. Data from Deep Screen 2 (FIG. 37) and small RNAseq profiling for these candidates are listed in Table 25. For these selected hits, the mean of replicate 1 and replicate 2 T₁/T₀ log₂ ratios were all within 1 standard deviation (0.22) of the median (−0.07)log₂ ratio of miR100 and miR100_M amiRNAs targeting ATXN2.

TABLE 25
Data from Deep Screen 2 and small RNAseq
profiling

| | Rep. 1 | Rep. 2 | Rep. | Rep. | miR_ | Guide | Guide: |
|---|---|---|---|---|---|---|---|
| Po- | lo10/ | lo10/ | 1 | 2 | with_ | Se- | Pas- |
| si- | unsort | unsort | T₁/T₀ | T₁/T₀ | suf- | quences | senger |
| tion | log2FC | log2FC | log2FC | log2FC | fix | (DNA) | ratio |
| 1755 | −2.70 | −2.64 | 0.04 | −0.12 | miR- | TCGGGTT | 161 |
| | | | | | 100 | GAAATCT | |
| | | | | | | GAAGTGT | |
| | | | | | | G | |
| | | | | | | [SEQ ID | |
| | | | | | | NO: | |
| | | | | | | 657] | |
| 2586 | −2.40 | −2.24 | −0.28 | −0.08 | miR- | TAGATTC | 390 |
| | | | | | 100 | AGAAGTA | |
| | | | | | | GAACTTG | |
| | | | | | | G | |
| | | | | | | [SEQ ID | |
| | | | | | | NO: | |
| | | | | | | 1621] | |
| 2945 | −2.61 | −2.17 | 0.10 | −0.31 | miR- | TGTAGTA | >778:0 |
| | | | | | 100 | GAAGGCT | |
| | | | | | | TTGGCTG | |
| | | | | | | A | |
| | | | | | | [SEQ ID | |
| | | | | | | NO: | |
| | | | | | | 685] | |
| 3133 | −2.66 | −2.33 | 0.21 | 0.27 | miR- | TATGTCT | 78 |
| | | | | | 100_M | TGGCTTG | |
| | | | | | | ATTCACT | |
| | | | | | | G | |
| | | | | | | [SEQ ID | |
| | | | | | | NO: | |
| | | | | | | 1624] | |
| 3270 | −2.09 | −1.46 | 0.05 | 0.03 | miR- | TACTGTA | >334:0 |
| | | | | | 100 | GGCAACA | |
| | | | | | | TATTGCG | |
| | | | | | | T | |
| | | | | | | [SEQ ID | |
| | | | | | | NO: | |
| | | | | | | 2080] | |
| 3301 | −2.52 | −2.09 | −0.19 | −0.27 | miR- | TGAACAA | 92 |
| | | | | | 100_M | GGGGCTG | |
| | | | | | | ATTTGGG | |
| | | | | | | A | |
| | | | | | | [SEQ ID | |
| | | | | | | NO: | |
| | | | | | | 687] | |
| 3302 | −2.89 | −2.36 | −0.09 | −0.30 | miR- | TTGAACA | 41 |
| | | | | | 100_M | AGGGGCT | |
| | | | | | | GATTTGG | |
| | | | | | | G | |
| | | | | | | [SEQ ID | |
| | | | | | | NO: | |
| | | | | | | 688] | |
| 3330 | −2.18 | −2.12 | 0.30 | −0.06 | miR- | TATGCTG | 39 |
| | | | | | 100 | AGACTGA | |
| | | | | | | TAATGTG | |
| | | | | | | G | |
| | | | | | | [SEQ ID | |
| | | | | | | NO: | |
| | | | | | | 1614] | |
| 3338 | −1.91 | −2.25 | 0.03 | −0.15 | miR- | TACATGA | 212 |
| | | | | | 100 | GGATGCT | |
| | | | | | | GAGACTG | |
| | | | | | | A | |
| | | | | | | [SEQ ID | |
| | | | | | | NO: | |
| | | | | | | 1620] | |

[0478] The above miRNAs as well as 911 controls for 1755 (guide sequence SEQ ID NO:1185) and 2945 (guide sequence SEQ ID NO:1213) were tested for knockdown of ATXN2 in stem-cell derived motor neurons. amiRNAs were packaged in cis plasmids to generate self-complementary AAV-DJ vectors containing a long H1 promoter (nucleotides 113-343 of SEQ ID NO:2257), and a stuffer sequence “PSG11_V5” (nucleotides 489-2185 of SEQ ID NO:2257). Sequences for vectors encoding amiRNAs miR100_1755 (SEQ ID NO:1915), miR100_2586 (SEQ ID NO:1982), miR100_2945 (SEQ ID NO:1965), and miR100_3330 (SEQ ID NO:2021) from 5′ ITR to 3′ ITR are provided in SEQ ID NO:2257, SEQ ID NO:2258, SEQ ID NO:2259, and SEQ ID NO:2260, respectively. After titering each vector, and based on hemacytometer based quantification of number of cells plated, vectors were added at intended doses of 3.16E3 and 3.16E4 vector genomes per cell. 7 days after addition of vectors, neurons were harvested and RNA isolated with miRNeasy Tissue/Cells Advanced Mini Kit (Qiagen, P/N 217604) ATXN2 knockdown was assessed by digital droplet RT-PCR, measuring the ratio of ATXN2 expression to housekeeping controls GUSB and B2M.

[0479] FIG. 38 shows individual data points, and Table 26 shows mean and standard deviation of knockdown across these constructs, at the two doses of 3.16E3 vg/cell and 3.16E4 vg/cell, normalized to ATXN2 expression values from untransduced cells, which were treated with an equivalent volume of AAV diluent.

TABLE 26
ATXN2 Knockdown by amiRNAs in stem-cell derived
motor neurons at two different doses

| miR | mean_ATXN2_3160 | SD | N | mean_ATXN2_31600 | SD | N |
|---|---|---|---|---|---|---|
| miR100_1755 | 26.8 | 1.7 | 6 | 14.0 | 2.1 | 6 |
| miR100_2586 | 41.8 | 2.9 | 6 | 29.3 | 1.0 | 6 |
| miR100_2945 | 36.7 | 1.7 | 6 | 26.8 | 2.6 | 6 |
| miR100_3270 | 72.1 | 5.1 | 6 | 47.9 | 2.2 | 6 |
| miR100_3330 | 44.1 | 6.3 | 6 | 32.2 | 2.7 | 6 |
| miR100_3338 | 36.5 | 3.6 | 6 | 23.6 | 5.5 | 6 |
| miR100_M_3133 | 30.6 | 1.0 | 5 | 23.8 | 1.5 | 6 |
| miR100_M_3301 | 83.7 | 9.1 | 6 | 49.1 | 3.7 | 6 |
| miR100_M_3302 | 38.0 | 3.0 | 6 | 32.3 | 3.3 | 6 |
| Untransduced | 100 | 9.5 | 12 | | | |

### Dose Response Studies

[0480] The candidates AAVs were also tested at a more extensive range of doses in motor neurons. As before, RNA was isolated from the cultures after 7 days of culture, and ATXN2 knockdown assessed. FIG. 39 shows plots of knockdown across different concentrations of each vector added. Concentration of ATXN2 mRNA, normalized for each data point by B2M expression, and collectively to the ATXN2 expression level in neurons treated with vehicle (PBS+0.001% PF-68) was measured by digital droplet RT-ddPCR. By examination, differences in potencies of amiRNAs can be observed; for example miR100_1755 exhibits knockdown at lower vector genome exposures than other amiRs; mir100_3301 and miR100_3270 appear to exhibit reduced potency relative to other vectors.

[0481] Neurons dosed at 3.16E3 vector genomes per cell were additionally subject to small RNA sequencing. Table 27 shows the abundance of the amiRNA, as a fraction of total miRNA. There was a surprising range of expression levels, and several amiRs (1755, 2586, 2945, and 3270) had considerably less amiRNA detected than other amiRNAs.

[0482] For these small RNA experiments, reads were not ‘deduplicated’ (by eliminating reads with identical flanking 5′ and 3′ 4-mer random adapters) as in small RNA analysis for deep screen 1 libraries, because the number of reads of the artificial miRNAs in some cases approached the number of unique combinations of nucleotides in the adapters.

TABLE 27
Abundance of amiRNA, as a fraction of total miRNA

| | Rep1 amiRNA/ | Rep2 amiRNA/ |
|---|---|---|
| Guide | total miRNA (%) | total miRNA (%) |
| mir100_1755 | 1.80 | 2.77 |
| mir100_2586 | 2.53 | 2.73 |
| mir100_2945 | 3.20 | 3.30 |
| mir100_3270 | 1.21 | 1.43 |
| mir100_3330 | 16.83 | 17.75 |
| mir100_3338 | 23.84 | 25.00 |
| mir100M_3133 | 22.82 | 22.57 |
| mir100M_3301 | 22.07 | 17.53 |
| mir100M_3302 | 38.04 | 36.78 |

[0483] To assess whether AAV amiRNA treatment had any obvious impact on neuronal morphology or cell counts, neurons grown in 96-well format were treated with AAV or vehicle at a dose of 1E4 vector genomes/cell, and 7 days later fixed and stained with Hoechst, anti-Isl1, and anti-Beta3 tubulin antibodies to visualize nuclei, a motor neuron marker, and neuronal processes respectively. FIG. 40 shows representative images from cultures treated with indicated amiRNA AAVs and controls, demonstrating that no AAV miRNA exhibited obvious impacts on neuronal morphology. FIG. 41A shows zoomed in images comparing miR100_1755 and miR100_1755_911 (a 911 control, rendered inactive for slicing Atxn2 by complementing bases 9, 10 and 11 of the 1755 amiRNA). No obvious differences can be seen, suggesting that Atxn2 knockdown does not cause dramatic changes in neuronal process or nuclear morphology. Panels on right quantify the total number of Hoechst+ nuclei (FIG. 41B) and the % of total nuclei that are Isl1+ (FIG. 41C). Compared to vehicle-treated (PBS+0.001% PF-68) wells, significant differences (p<0.05) were observed for a few of the AAV-amiRNA treatments, with a reduction in total number of nuclei per field. However, one of these treatments (miR100_1755) were also showed with a significant increase in the fraction of cells that were Isl1+, and an apparent trend toward increasing Isl+ neurons was apparent for other AAV-DJ amiRNAs, arguing against any alteration in total motor neuron numbers. There were no significant differences between neurons transduced with any of the active AAV amiRNAs and the inactive 911 control AAV amiRNAs.

### RNAseq Studies

[0484] RNA was collected from motor neurons 7 days after dosing with 1E4 vector genomes/cell of the above AAVs. There were 6 replicates per condition, except miR100_1755_911, which had 5. To determine if ATXN2 knockdown from AAV expression impacts the transcriptome in neurons, RNA expression was compared between neurons transduced with active amiRNA-expressing vectors and vectors expressing a cognate 911 control. FIG. 42 shows ‘volcano plots’ of differential expression for miR100_1755 vs. miR100_1755_911 and miR100_2945 and miR100_2945_911. A large separation can be seen in nominal p-values for the differential expression calculated for ATXN2 versus all other genes. Remarkably, after adjustment of nominal p values for multiple comparisons using the Benjamini-Hochberg procedure, only ATXN2 or one other gene exceeded a 10% false discovery rate threshold for 1755 and 2945, respectively.

[0485] To further investigate whether there was any impact on any of the predicted off-target genes (the set of transcripts with 2 or fewer mismatches to bases 2-18 of each amiRNA), each amiRNA was compared to data from all other active amiRNAs (FIG. 43). For this set of selected amiRNAs, few of the predicted off-targets exceed the 10% false discovery rate threshold. This suggests that these amiRNAs yield specific knockdown of ATXN2.

### Methods

[0486] ddPCR AAV Titering

[0487] To titer AAVs, each vector was serially diluted in Salmon Sperm DNA solution (20 ng/ul Salmon Sperm DNA, 0.001% PF-68, 10 mM Tris-HCl pH 7.5, 50 mM KCl, 1.5 mM MgCl₂) and subsequently heated at 95° C. for 10 minutes to release the vector genome from the AAV9 capsid. After an incubation with SmaI to reduce secondary structure, known to inhibit the rAAV PCR reactions, (NEB, R0141L), droplets were generated using DG32 Automated Droplet Generator (Bio-Rad), followed by a PCR amplification with vector-specific primer/probe sets. Once complete, droplets were analyzed using QX200 Droplet Digital PCR System (Bio-Rad), and positive and negative populations were definded, and the dilution factor applied to determine the concentration of the undiluted vector stock.

### Motor Neuron Immunocytochemistry

[0488] Motor neuron cultures were fixed in 4% Paraformaldehyde for 10 minutes at room temperature. Fixed cultures were permeabilized and blocked in PBS containing 0.2% Triton-X-100 and 10% donkey serum solution for 45 minutes at room temperature. Cells were then incubated in blocking solution (10% donkey serum in 0.1% Tween-PBS) containing primary antibody overnight at 4 C. Cells were washed 3 times with PBS-0.1% Tween and then incubated in blocking solution containing secondary antibodies for 1-2 hours at room temperature followed by 3 washes with PBS-0.1% Tween and a rinse with a PBS solution containing Dapi. Stained cultures were imaged on the Perkin Elmer Operetta high content imager with 20× water objective. 40-60 fields were imaged for every well. Cell quantifications were done using the Perkin Elmer Harmony software. Statistical analysis was done using GraphPad Prism software. Primary antibodies used: TUJ1 (1:500 dilution) ISL1 (1:200 dilution) secondary antibodies: AlexaFluor 488 and AlexFluor 647 (1:500 dilutions).

| Reagent | Vendor | Cat. No. |
|---|---|---|
| 32% Paraformaldehyde | Fisher Scientific | 50-980-495 |
| Triton X-100 | Sigma | T8787-100ML |
| Tween 20 | Sigma | P1379-100ML |
| Donkey Serum | Jackson Immuno | 017-000-121 |
| | Research | |
| Donkey anti-chicken secondary antibody- | Jackson Immuno | 703-606-155 |
| Alexa fluor 647 | Research | |
| ISL1 antibody | Abcam | ab 109517 |
| TUJ1 antibody | Abcam | ab41489 |
| Donkey anti-rabbit secondary antibody- | ThermoFisher | A32790 |
| Alexa fluor 488 | | |
| DAPI solution | ThermoFisher | 62248 |
| Phosphate-Buffered Saline (PBS) pH 7.4 | ThermoFisher | 10010023 |

### Off-Target Prediction

[0489] To generate a set of predicted off-targets, bases 2-18 of amiRNAs were aligned to the human transcriptome using bowtie commands:

bowtie -n 2 -l 17 -e 81 -seed [pseudorandom number to enforce reproducibility]-nomaqround -tryhard -chunkmbs 256 --all --time (and additional commands for input/output handling). To ensure that only 2 or fewer mismatches occurred, fastq file inputs to the bowtie alignment containing amiRNAs to be tested were constructed in which each amiRNA was given a phred score ‘mask’ of IIIIIIIIIIIIIIIII, such that alignments of the amiRNA with transcripts where more than 2 mismatches occurred would exceed the weight threshold. The amiRNas were aligned to the build Homo_sapiens.GRCh38.cdna.all, Macaca_fascicularis.Macaca_fascicularis_5.0.cdna.all, or Mus_musculus.GRCm38.cdna.all.

### RNAseq

[0490] Stem-cell derived motor neuron cultures were plated at a density of 200,000 cells per well of 6-well plates. 6 days after plating, cells were transduced with AAV vectors at a dose of 10,000 vector genomes (calculated by titering method described above) per cell. 7 days later, cells were harvested for RNA._Lysis of transduced samples was conducted by addition of 300 ul of Buffer RLT Plus, followed by overnight freeze at −80. Samples were thawed on ice and processed according to the remainder of the RNeasy Plus standard protocol. (Qiagen RNeasy Plus Micro Kit (Catalog 74034)), according to manufacturer's instructions. All purified RNA samples were quantified by Qubit (using RNA HS standard). A selection of samples with low, mid, and high RNA concentrations (16 in total) were further characterized by Tapestation (High Sensitivity RNA) to check purity (RINe score) and verify Qubit quantification. All RINe scores were in the 9.9-10 range, near maximal.

[0491] Purified RNAs were then used as input into QuantSeq [Lexogen catalog #015 (QuantSeq 3′ mRNA-Seq Library Prep Kit for Illumina (FWD)]. Target RNA input was 100 ng per reaction (for lower concentration samples, the maximum input volume of 5 ul was used). The standard Quantseq protocol was followed with the following modifications: (1) UMI addition at step 7 using the “UMI Second Strand Synthesis Module” (Lexogen Cat. No. 081). (2) 20 cycles for library amplification. Resulting libraries were quantified by Qubit (DNA HS) and QC spot-checked on Tapestation (HS D5000). Libraries were pooled based on Qubit quantifications and sequenced on an Illumin NovaSeq (Seqmatic). Sequencing parameters were as follows: NovaSeq S1 run, single-read 100 bp, single index 6 bp.

### RNAseq Analysis

[0492] To analyze RNAseq data, SeqTK was used to split each of the single-end reads obtained from each sample into fastq files containing the UMI and read sequence, respectively:

seqtk trimfq -b 10 raw.fastq > sequence.fastq
seqtk trimfq -e [readsize - 6] raw.fastq > umi.fastq

The resulting sequences were then pseudoaligned with kallsito version 0.46.0 (Bray et al., Nature Biotechnology 2016 34: 525-527). in batch mode to a transcriptome assembly derived from the the trailing 600 bp of all cdnas present in Ensembl release 96 (kmer length=19) using the following command:

kallisto pseudo --umi --quant --single -t 8 -i [kallisto_index] -o
[output_file] - b [batch_file.txt]

Aligning reads were summed across all transcripts annotated to each gene to generate gene-level count matrices. Genes with five or more counts observed in all replicates of at least one experimental condition were considered in downstream analyses. Sample read counts were converted to base-2-log(CPM) and normalized via TMM (edgeR::calcNormFactors) prior to probability weight estimation via limma::voom. (Law et al., Genome Biology (2014) 15:R29). Evidence for differential expression was quantified by fitting a genewise linear model on the normalized expression values, with fold changes extracted from the model coefficients and associated P-values estimated using a Wald test. Genewise P-values were corrected for multiple testing using the FDR approach.

### Example 8: In Vivo Testing of Candidate amiRNAs in Wild-Type Mouse

[0493] Two additional studies of in vivo performance of amiRNAs embedded in self-complementary AAV9 vectors were conducted. In a first study, amiRNA 1784 and 3330, in the miR1-1 or miR100 backbone, respectively, were tested in a variety of vector genomes containing different promoters and stuffers. The specific miR cassettes used for in vivo testing are provided in Table 28.

TABLE 28
Specific miR cassettes used in vivo

| Cassette | Sequence |
|---|---|
| miR1- | CATGCAGACTGCCTGCTTGGGTACAGACCAAAGAGTA |
| 1.1784 | GTCGAATTATGGACCTGCTAAGCTAATTAACTACTCTT |
| | TGGTCTGAACTCAGGCCGGGACCTCTCTCGCCGCACTG |
| | AGGGGCACTCCACACCACGGGGGCC |
| | (SEQ ID NO: 538) |
| miR | CCCAAAAGAGAGAAGATATTGAGGCCTGTTGCCACAT |
| 100.3330 | ATGCTGAGACTGATAATGTGGGTATTAGTCCGCCACAT |
| | CATCCGTCTCAACATTTGTGTCTGTTAGGCAATCTCAC |
| | GGACCTGGGGCTTTGCTTATATGCC |
| | (SEQ ID NO: 2019) |

The vector designs, including specific promoter and stuffer, are described separately. Here the performance of the amiRNAs is compared in several overall vector formats and promoters. AAV was dosed to wild-type mice either intravenously (dose: 3.21E9 vg/gram mouse) or by intrastriatal injection (dose: 7.5E9 vg total).

[0494] Table 29 shows mean ATXN2 knockdown as assessed in liver 3 weeks after intravenous dosing, relative to animals dosed with vehicle (PBS with 0.001% PF-68). Atxn2 expression was assessed by digital droplet RT-PCR, and knockdown was taken as the mean of Atxn2/Hprt and Atxn2/Gusb ratios, as measured by ddPCR.

TABLE 29
ATXN2 Knock-down in Liver After I.V. amiRNA Dosing

| | mean Atxn2 | | |
|---|---|---|---|
| miR | (% Vehicle injected) | SD | N |
| miR1-1.1784 | 10.8 | 6.5 | 12 |
| miR100.3330 | 14.7 | 4.7 | 12 |

[0495] For striatal samples, vector biodistribution after collection of punch biopsies was more variable from sample to sample. Vector distribution was assessed by digital droplet PCR, measuring the relevant number of droplets amplifying for primer/probesets recognizing the AAV vector genome versus primer/probesets recognizing the Tert gene in the mouse genome. Because there are a fixed number of copies of the Tert gene per cell (2), the number of vector genomes per cell (diploid genome) can be measured in this way. By assessing AAV vector distribution in the same biopsies as ATXN2 mRNA was quantified, a clear dose response trend can be seen (FIGS. 44, 45A-45B). It should be noted that the amount of nuclear vector genomes versus cytoplasmic or extracellular vector was not assessed, such as by histological methods; it is possible that vector introduced by intraparenchymal injections may accumulate extracellularly. Nonetheless, the clear dose response shows that even if not all of the vector genomes measured are in the nucleus, available to express the amiRNA, there is a clear correlation between any such total vector genome exposure and functionally active vector genomes.

[0496] To determine the relationship between amiRNA expressed and knockdown, amiRNA was quantified in two ways. First, libraries using TaqMan Advanced miRNA cDNA Synthesis Kit (Thermo, P/N A28007) were generated for all striatal punch biopsy samples, using RNA isolated with a kit which enriches for small RNAs (Qiagen, P/N 217604). To generate a cDNA library for TaqMan qPCR, 3′ poly-A tailing is first complete, then 5′ ligation to add on an adaptor. After reverse transcription, the cDNA is PCR amplified for 14 cycles, then a dilution of the final amplification product is subject to qPCR with primer probe sets specific to exogenous and endogenous miRNAs. Primer/probesets designed to target exogenous amiRNAs were used (Thermo), as well as primer/probesets targeting endogenous miRNAs miR-21a-5p (Thermo, P/N mmu482709_mir) and miR-124-3p (Thermo, P/N mmu480901_mir) as controls. The abundance of miRNA is assessed by the qPCR cycle number at which target amplification occurs. Comparing the qPCR cycle where amplification occurs (CT) between primer/probesets targeting different miRNAs allows assessing the relative abundance of miRNAs.

[0497] FIGS. 45A-45B plots the difference in CT value between amiRNA and endogenous control, as well as the difference between two endogenous miRNAs (miR-21 and miR-124), against the vector biodistribution in the same sample. As can be seen, there is no obvious change in the difference in CT thresholds between endogenous miRNAs with increasing detection of AAV vector genome. By contrast, there is what appears to be a log-linear relationship between the expected increase in the CT separation between the amiRNA and endogenous miRNA and vector exposure, consistent with greater amiRNA expression with increased exposure to AAV.

[0498] For a subset of samples, small RNAseq was additionally conducted. As above, amiRNA expression normalized by total miRNA expression was quantified for each sample. Since for these samples amiRNA expression was quantified both by small RNAseq and qPCR, a model could be fit to establish how qPCR predicts amiRNA expression as a function of total miRNA. Therefore a linear model was fit (FIG. 46), with good explanation of the variance (R²>0.89) for both amiRNAs.

[0499] Using this model, the qPCR-assessed amiRNA expression values for miR100_3330 and miR1.1.1784 in all samples could be converted to an absolute scale, of amiRNA/total miRNA. Plotting ATXN2 mRNA in striatal biopsies versus this metric of predicted amiRNA expression, there was considerably greater knockdown per miRNA expressed in samples expressing the miR100-3330 amiRNA versus samples expressing the miR1.1.1784 amiRNA (FIG. 47). Therefore, although as a function of vector dosed, more knockdown was induced by vectors expressing miR1.1.1784, as a function of amiRNA expressed, more knockdown was induced by miR100.3330. This suggests that in vivo the potency of the approximately 22 nucleotide final product of pri-miRNA processing is higher for miR100.3330 than for miR1.1.1784.

[0500] In a second study, self-complementary vectors expressing amiRNAs miR100_1755 (SEQ ID NO:1915), miR100_2945 (SEQ ID NO:1965), miR100_3330 (SEQ ID NO:2021), and miR100_2586 (SEQ ID NO:1982) were packaged in AAV9 with a cis plasmid as described above containing a stuffer sequence “PSG11_V5” (nucleotides 489-2185 of SEQ ID NO:2257), a long H1 promoter (nucleotides 113-343 of SEQ ID NO:2257) and dosed intravenously or intrastriatally in adult wild-type mice. 5′ ITR to 3′ ITR sequences for these vectors, as described in Example 7, are provided in SEQ ID NO:2257 (scAAV_H1_long_miR100_1755_PSG11_V5_ITR_to_ITR.gb), SEQ ID NO:2258 (scAAV_H1_long_miR100_2586_PSG11_V5_ITR_to_ITR.gb), SEQ ID NO:2259 (scAAV_H1_long_miR100_2945_PSG11_V5_ITR_to_ITR.gb), and SEQ ID NO:2260 (scAAV_H1_long_miR100_3330_PSG11_V5_ITR_to_ITR.gb). Because the mouse Atxn2 transcript has several mismatches to 2586, no knockdown of mouse Atxn2 transcript is expected.

[0501] During the intravenous study, 4 animals were dosed per group for a 3-week study. There were no clinical observations noted during weekly observation. For ALT and AST analysis, blood was collected via submandibular vein into serum tubes and allowed to clot for 30 minutes. Samples were centrifuged at 12,000 rpm for 5 minutes at 4° C. Serum was collected into clean Eppendorf tubes and stored at −80° C. until further analysis at IDEXX. Results were reported as AST (U/L) and ALT (U/L). FIG. 48 shows liver enzyme data at 2 and 3 weeks post-dosing. All ALT and AST values were within normal ranges at these timepoints.

[0502] During the intrastriatal study, 6 animals were dosed 4 microliters per striatum per group for a 3-week study. There were no group wide clinical observations noted for 7 days following injection and during weekly observation and there were no unscheduled deaths. For one cage dosed with miR100-2586, fighting was observed but the bully was separated, and all animals completed the study.

[0503] Knockdown performance of vectors was tested in liver. Table 30 quantifies remaining Atxn2, normalizing Atxn2 to two different control genes (Hprt and Gusb) and further normalized to Atxn2 expression levels in naïve animals. From the same liver samples, as above biodistribution was measured. Samples treated with different vectors had highly similar exposures in liver.

TABLE 30
Atxn2 knockdown of amiRNA containing vectors in liver

| | Mean % | | | | |
|---|---|---|---|---|---|
| | Control | | Mean | | |
| | Atxn2 | mRNA | Biodistribution | SD | |
| Treatment | mRNA | SD | (VG/DG) | (VG/DG) | N |
| miR100_1755 | 22.1 | 3.3 | 5.93 | 1.70 | 4 |
| miR100_2945 | 29.3 | 5.0 | 5.77 | 0.50 | 4 |
| miR100_3330 | 27.9 | 0.8 | 5.71 | 0.36 | 4 |
| None | 100.0 | 10.5 | 0.01 | 0.01 | 4 |

[0504] Knockdown performance of these vectors was further assessed in brain after intrastriatal injections. As in the study described above DNA, mRNA and small RNA were isolated from punch biopsies in order to simultaneously monitor vector biodistribution, Atxn2 knockdown, and amiRNA expression. Although in this in vivo study exposure levels were lower than in the above study with miR1.1.1784 and miR100_3330, for unknown reasons, a clear dose response is visible (FIG. 49).

[0505] amiRNA expression versus total miRNA expression was assessed in a subset of samples in both liver and striatal punch biopsies. FIG. 50 shows, for each tissue, vector biodistribution-normalized miRNA expression. In both tissues, miR100_1755 has the lowest miRNA expression, followed by miR100_2945, miR100_3330, and lastly miR100_2586.

[0506] Guide processing precision was also assessed in vivo, by counting reads that initiated at each position of the guide and predicted passenger sequences. FIGS. 51, and 52A-51D shows the count of reads aligning to the miR at the start position, where +0 is the expected typical cut position. Table 31 quantifies the proportion out of all reads (including all guide and passenger strand reads) initiating at the +0 and +1 positions for each amiR. FIGS. 52A-52D show the read counts for the top 20 most common sequences for miR100_1755, miR100_2586, miR100_2945 and miR100_3330. Interestingly, by comparing the observed reads versus the pri-miRNA sequence, post-translational modifications such as 3′ monoadenylation or monouridylation can be noted. Since 3′ mismatches to the target transcript have in some cases been reported to increase the knockdown performance of miRNAs (Becker et al., Molecular Cell (2019) 75:741-755), it may be the case that this 3′ modification of these amiRs may contribute to the high knockdown performance of Atxn2.

TABLE 31
Proportion of amiRNAs Initiating at Position + 0 or + 1

| amiRNA | Proportion cut at + 0 | Proportion cut at + 1 |
|---|---|---|
| mir100_1755 | 97.67 | 1.07 |
| mir100_2586 | 98.51 | 0.99 |
| mir100_2945 | 98.34 | 0.94 |
| mir100_3330 | 97.08 | 2.07 |

Table 32 quantifies the ratio of guide to passenger strand reads. The ratio of reads detected from guide versus passenger strand for all of these miR100 backbone amiRs exceeded 300:1 in vivo. This high processing ratio may reduce the likelihood of off-target effects.

| amiRNA | Ratio guide:passenger |
|---|---|
| mir100_1755 | 399.8 |
| mir100_2586 | 1061.7 |
| mir100_2945 | 651.3 |
| mir100_3330 | 508.3 |

### Methods

[0507] For intravenous injection, vector was diluted in PBS with 0.001% PF-68 at 3.21E9vg/10 microliters, and mice were injected via tail vein based on weight (average total dose of 8.5E10 VG). Mice are placed in a restrainer and the tail is swabbed with a sterile alcohol wipe to increase vein visibility. Once a lateral tail vein is located, a 32-gauge insulin syringe is used to administer the solution. 3-weeks post-injection, mice were fasted for 4 hours, blood collected via vena cava and serum processed for AST and ALT analysis. Following PBS perfusion, liver was cut into sections and placed in a homogenizing tube (Precellys, P/N P000933-LYSK0-A) and snap frozen in liquid nitrogen. For tissue homogenization, Buffer RLT supplemented with beta-Mercaptoethanol was added to the sample and a Precellys Cryolys Evolution (Bertin Instruments) with program setting 3×45 s at 5000 rpm with 15 s pauses was performed. Samples tubes were centrifuged at 18,000×g for 3 minutes and a fraction of the homogenate was used for DNA, RNA, and protein purification using the AllPrep DNA/RNA/Protein Mini Kit (Qiagen, P/N 80004) and the other fraction of the homogenate was used for small RNA purification using the miRNeasy Tissue/Cells Advanced Mini Kit (Qiagen, P/N 217604).

[0508] For intrastriatal injections, vector was diluted in PBS with 0.001% PF-68 at 7.5E9vg/4 microliters, and mice were injected at coordinates (relative to Bregma) 1.5 mm anterior, +/−1.6 mm lateral, and −4.0 mm ventral with 4 uL per hemisphere (Hamilton P/N 7635-01) over 5 minutes. After 3-weeks post-injection, mice were perfused transcardially with cold PBS and the brain placed in a matrix (CellPoint Scientific, Alto Acrylic 1 mm Mouse Brain Coronal 40-75 gm), and a 2 mm cornal section containing the injection site was excised. Within the coronal section, a 2 mm punch biopsy of both the left and right striatum was collected and placed into separate homogenizing tubes (Precellys, P/N P000933-LYSK0-A) then snap frozen in liquid nitrogen. For tissue homogenization, Buffer RLT supplemented with beta-Mercaptoethanol was added to the sample and homogenization with a Precellys Cryolys Evolution (Bertin Instruments) with program setting 3×45 second at 5000 rpm with 15 second pauses was performed. Samples tubes were centrifuged at 18,000×g for 3 minutes and a fraction of the homogenate was used for DNA, RNA, and protein purification using the AllPrep DNA/RNA/Protein Mini Kit (Qiagen, P/N 80004) and the other fraction of the homogenate was used for small RNA purification using the miRNeasy Tissue/Cells Advanced Mini Kit (Qiagen, P/N 217604).

### Example 9: Pharmacology Study of AAV Vector Expressed amiRNA Targeting ATXN2 in Non-Human Primates

[0509] Testing in non-human primates is conducted to establish knockdown of ATXN2 by ATXN2-targeting amiRNA rAAV vectors in tissues relevant to neurodegenerative disease, via clinically relevant routes of administration. Tissues to be assessed include spinal cord ventral horn, motor cortex, and cerebellum, which are relevant to neurodegenerative diseases such as ALS or Spinocerebellar ataxia-2.

[0510] In non-human primates, test articles (1×10¹²-1×10¹⁴ vg of amiRNA expressed with a H1 promoter and packaged in AAV9) or vehicle are administered into the cisterna magna by intrathecal cervical (IT-C) catheter. Male and female cynomolgus monkeys (Macaca fascicularis) of approximately 2.5-4 kg body weight, are implanted with an intrathecal cervical catheter for dose administration and sample collection. Test articles are administered (4 animals per test article) comprising a single 2.5 mL dose of vehicle or test article via the implanted intrathecal catheter at a rate of 0.3 mL/minute, followed by 0.1 mL of vehicle to flush the dose from the catheter. At 5 to 26 weeks following the administration, animals are sacrificed, and selected tissues harvested for bioanalytical and histological evaluation. ATXN2 protein and mRNA levels are assessed for suppression after treatment with ATXN2 amiRNA packaged in AAV9 with a H1 promoter, relative to the vehicle group.

### Vector Assessment

[0511] Test articles for dosing in non-human primates are assessed by multiple assays. One assessment is analytical ultracentrifugation (AUC) for empty and full capsids and quantification of aggregates. Absorbance scans are collected as the material sediments under the force of a gravitational field. Sample sedimentation profile is monitored in real time during centrifugation, which gives an absolute measurement of molecule size and shape. The distribution movement over time is used to calculate the sedimentation coefficient. Fitting the raw data to the Lamm equation results in a continuous distribution, and area under each peak is proportional to the amount present in solution. Empty capsids are expected to sediment at 65S, partial capsids between 65 and 95S, full capsids at 95S, and aggregates at >110S. Measurements indicating majority full capsids are desirable.

[0512] AAV9 capsid ELISA is used to assess intact AAV9 capsids. The capture-antibody detects a conformational epitope that is not present on unassembled capsid proteins. The ADK9 antibody is used as capture and detection antibody in the AAV9 titration ELISA. Assay results are expected to corroborate AUC assessment, by comparing AAV9 capsid ELISA with vector genome titers.

[0513] Endotoxin is assessed by Limulus amebocyte lysate (LAL). Detection and quantification of bacterial endotoxins less than 10 EU/mL is desired.

[0514] Bioburden is assessed by direct inoculation, and less than 10 CFU/100 mL is desired.

[0515] For lot release and stability, an in vitro potency assay for gene therapy product potency is performed. In vitro potency is assessed by amiRNA expression by RT-qPCR, ATXN2 mRNA levels by RT-ddPCR, and ATXN2 protein levels by ATXN2 protein FACS in 2v6.11 or Lec2 cells. Cells may be pre-treated with 1 ug/mL ponasterone A (Invitrogen, H10101), 50 mU/mL neuraminidase (Sigma, N7885), and 2 mM hydroxyurea (Sigma, H8627) prior to transduction. Serial dilutions of vector are used to treat cells in a 96 well format, incubating at 4° C. for 30 min, and then 90 min following application of vector. Plates are then transferred to 37° C. After 2-3 days amiRNA, ATXN2 mRNA, and ATXN2 protein are assessed at each dose.

[0516] In vivo potency in some experiments is tested prior to dosing non-human primates and is assessed by single dose (such as 8.5E10 vg/gram) administration of test article intravenously into wild-type C57Bl/6 mice. Liver biopsy is collected, homogenized, and DNA and RNA are extracted by Allprep DNA/RNA/Protein mini kit (Qiagen, 80004) for assessment of vector distribution and ATXN2 mRNA knockdown in liver.

[0517] Median Tissue Culture Infectious Dose (TCID50) to assess vector infectivity is performed in HelaRC32 cells. HelaRC32 stably express AAV2 rep and cap genes, and the assay involves serial dilutions of vector in a 96 well plate and co-infection with Adenovirus 5 helper virus, lysing cells, extracting DNA, performing qPCR or ddPCR on the vector genome to assess number of infected cells per well across the dilution range.

### Biodistribution and Pharmacodynamic Activity

[0518] Non-human primate brain and spinal cord tissue from rAAV vector and control treated animals are collected by punch biopsy or as slabs at necropsy and snap frozen. Samples are homogenized by addition of Buffer RLT (Qiagen) supplemented with beta-mercaptoethanol. Ceramic bead-based homogenization (Precellys, CK14 2 mL) is performed using 3 cycles of 15 s at 6500 rpm and 10 s break. DNA, RNA and protein are extracted with Allprep DNA/RNA/Protein Mini kit (Qiagen, 80004) and small RNA are extracted with miRNEasy Tissue/Cells Advanced Mini kit (Qiagen, 217604).

[0519] For isolation of motor neurons from rAAV dosed non-human primates, spinal cord tissues are frozen in liquid nitrogen at necropsy. Cryosections are generated and stained with ARCTURUS HistoGene Quick H&E Stain for LCM, and motor neurons are dissected from each section with the ARCTURURS XT LCM System. DNA and RNA from LCM samples are extracted with PicoPure kits (Thermo Fisher).

[0520] For histological evaluations, non-human primate brain and spinal cord tissue are collected at necropsy and fixed with 10% neutral buffered formalin for 24 hr, transferred to 70% ethanol for 3-10 days and embedded into paraffin blocks. Five-micron sections are cut, mounted onto glass slides, and stained for hematoxylin and eosin for histology, or stained in separate protocols for immunohistochemistry or in-situ hybridization.

[0521] Vector biodistribution in tissues from animals dosed with rAAV is assessed by ddPCR. Specifically, primer probes that amplify promoter and/or stuffer regions of the vector are used and compared to primer probes specific to host genome and results are expressed as vector genomes per diploid genome.

[0522] To isolate biodistribution in tissue material enriched for motor neurons, vector biodistribution is assessed by ddPCR on DNA isolated from spinal cord neurons captured by laser capture microdissection (LCM). Specifically, primer probes that amplify promoter and/or stuffer regions of the vector are used and compared to host diploid genome and results are expressed as vector genomes per diploid genome. Biodistribution in tissue material enriched for other disease-relevant cell types such as motor cortex, containing motor neurons, and cerebellum, containing Purkinje cells, can be assessed by the same ddPCR method in tissue punches from those brain regions.

[0523] To measure ATXN2 knockdown in spinal cord motor neurons, ATXN2 mRNA is assessed by RT-ddPCR in spinal cord neurons captured by laser capture microdissection. Knockdown of ATXN2 mRNA is assessed by comparison of spinal cord neurons in amiRNA treated subjects relative to the vehicle treated group, using the ratio of ATXN2 positive droplets to housekeeping genes (GUSB, B2M, TBP, or others). Significant knockdown of ATXN2 in spinal cord neurons in animals dosed with ATXN2 targeting amiRNAs relative to vehicle dosed animals is desirable.

[0524] ATXN2 mRNA in spinal cord neurons, cortical motor neurons, cerebellar purkinje cells and other relevant tissues is also assessed by in situ hybridization (ISH) in tissue sections, and by RT-ddPCR in tissue punches. By in situ hybridization, knockdown of ATXN2 mRNA is semi-quantitatively assessed by comparison of amiRNA treated subjects relative to the vehicle group. Significant knockdown in these tissues is desirable, with reductions in ATXN2 mRNA in spinal and cortical motor neurons particularly relevant for ALS and knockdown in Purkinje cells particularly relevant for SCA2. By RT-ddPCR, knockdown is assessed as described above.

[0525] ATXN2 protein in spinal cord neurons, cortical motor neurons, cerebellum, and other brain tissues is assessed by immunohistochemistry. Fixed slides are stained with monoclonal ATXN2 antibody (BD, 611378) or polyclonal ATXN2 antibody (Sigma, HPA018295-100UL) using standard protocols. Immunohistochemistry is used to semi-quantitatively assess knockdown of ATXN2 protein, and significant reduction in ATXN2 levels relative to vehicle treated animals is desirable.

[0526] Other assays for the pharmacology of ATXN2 amiRNA vectors dosed via administration into the cerebrospinal fluid in non-human primates that may be conducted include ATXN2 assays using alphaLISA® or Simoa® bead technology; or amiRNA detection assays from tissue or body fluids using miRNA-ISH or miRNA RT-qPCR.

[0527] ATXN2 protein in bulk tissue is assessed by alphaLISA. The capture antibody is monoclonal ATXN2 antibody (BD, 611378) and detection antibody is polyclonal ATXN2 antibody (ProteinTech, 21776-1-AP). ATXN2 protein in CSF is assessed by custom ATXN2 Simoa assay (Quanterix).

### REFERENCES

[0528] 1. Auyeung V C, Ulitsky I, McGeary S E, Bartel D P. Beyond secondary structure: Primary-sequence determinants license Pri-miRNA hairpins for processing. Cell. 2013. doi:10.1016/j.cell.2013.01.031
[0529] 2. Fang W, Bartel D P. The Menu of Features that Define Primary MicroRNAs and Enable De Novo Design of MicroRNA Genes. Mol Cell. 2015. doi:10.1016/j.molcel.2015.08.015
[0530] 3. Fowler D K, Williams C, Gerritsen A T, Washbourne P. Improved knockdown from artificial microRNAs in an enhanced miR-155 backbone: A designer's guide to potent multi-target RNAi. Nucleic Acids Res. 2015. doi:10.1093/nar/gkv1246
[0531] 4. Fellmann C, Hoffmann T, Sridhar V, et al. An optimized microRNA backbone for effective single-copy RNAi. Cell Rep. 2013. doi:10.1016/j.celrep.2013.11.020
[0532] 5. Kozomara A, Birgaoanu M, Griffiths-Jones S. MiRBase: From microRNA sequences to function. Nucleic Acids Res. 2019. doi:10.1093/nar/gky 1141
[0533] 6. Watanabe C, Cuellar T L, Haley B. Quantitative evaluation of first, second, and third generation hairpin systems reveals the limit of mammalian vector-based RNAi. RNA Biol. 2016. doi:10.1080/15476286.2015.1128062
[0534] 7. Zuker M. Mfold web server for nucleic acid folding and hybridization prediction. Nucleic Acids Res. 2003. doi:10.1093/nar/gkg595
[0535] 8. Chung K H, Hart C C, Al-Bassam S, et al. Polycistronic RNA polymerase II expression vectors for RNA interference based on BIC/miR-155. Nucleic Acids Res. 2006. doi:10.1093/nar/gkl143
[0536] 9. Lebbink R J, Lowe M, Chan T, Khine H, Wang X, McManus M T. Polymerase II promoter strength determines efficacy of microrna adapted shRNAs. PLoS One. 2011. doi:10.1371/journal.pone.0026213
[0537] 10. Pfister E L, Chase K O, Sun H, et al. Safe and Efficient Silencing with a Pol II, but Not a Pol lII, Promoter Expressing an Artificial miRNA Targeting Human Huntingtin. Mol Ther—Nucleic Acids. 2017. doi:10.1016/j.omtn.2017.04.011
[0538] 11. Dirren E, Aebischer J, Rochat C, Towne C, Schneider B L, Aebischer P. SOD1 silencing in motoneurons or glia rescues neuromuscular function in ALS mice. Ann Clin Transl Neurol. 2015. doi:10.1002/acn3.162
[0539] 12. Pfister E L, Dinardo N, Mondo E, et al. Artificial miRNAs Reduce Human Mutant Huntingtin Throughout the Striatum in a Transgenic Sheep Model of Huntington's Disease. Hum Gene Ther. 2018. doi:10.1089/hum.2017.199
[0540] 13. Borel F, Gernoux G, Cardozo B, et al. Therapeutic rAAVrh10 Mediated SOD1 Silencing in Adult SOD1G93A Mice and Nonhuman Primates. Hum Gene Ther. 2016. doi:10.1089/hum.2015.122
[0541] 14. Gao Z, Herrera-Carrillo E, Berkhout B. RNA Polymerase II Activity of Type 3 Pol III Promoters. Mol Ther—Nucleic Acids. 2018. doi:10.1016/j.omtn.2018.05.001
[0542] 15. Kampmann M, Horlbeck M A, Chen Y, et al. Next-generation libraries for robust RNA interference-based genome-wide screens. Proc Natl Acad Sci USA. 2015. doi:10.1073/pnas.1508821112
[0543] 16. Gu S, Jin L, Zhang Y, et al. The loop position of shRNAs and pre-miRNAs is critical for the accuracy of dicer processing in vivo. Cell. 2012. doi:10.1016/j.cell.2012.09.042
[0544] 17. Chang K, Marran K, Valentine A, Hannon G J. Generation of transgenic Drosophila expressing shRNAs in the miR-1 backbone. Cold Spring Harb Protoc. 2014. doi:10.1101/pdb.prot080762
[0545] 18. Hoye M L, Koval E D, Wegener A J, et al. MicroRNA profiling reveals marker of motor neuron disease in ALS models. J Neurosci. 2017. doi:10.1523/JNEUROSCI.3582-16.2017
[0546] 19. Ludwig N, Leidinger P, Becker K, et al. Distribution of miRNA expression across human tissues. Nucleic Acids Res. 2016. doi:10.1093/nar/gkw116
[0547] 20. Otaegi G, Pollock A, Hong J, Sun T. MicroRNA miR-9 modifies motor neuron columns by a tuning regulation of FoxP1 levels in developing spinal cords. J Neurosci. 2011. doi:10.1523/JNEUROSCI.4330-10.2011
[0548] 21. Morgens D W, Deans R M, Li A, Bassik M C. Systematic comparison of CRISPR/Cas9 and RNAi screens for essential genes. Nat Biotechnol. 2016. doi:10.1038/nbt.3567
[0549] 22. Hart T, Chandrashekhar M, Aregger M, et al. High-Resolution CRISPR Screens Reveal Fitness Genes and Genotype-Specific Cancer Liabilities. Cell. 2015. doi:10.1016/j.cell.2015.11.015
[0550] 23. Leonetti M D, Sekine S, Kamiyama D, Weissman J S, Huang B. A scalable strategy for high-throughput GFP tagging of endogenous human proteins. Proc Natl Acad Sci USA. 2016. doi:10.1073/pnas.1606731113
[0551] 24. Sack L M, Davoli T, Xu Q, Li M Z, Elledge S J. Sources of error in mammalian genetic screens. G3 Genes, Genomes, Genet. 2016. doi:10.1534/g3.116.030973
[0552] 25. Hawkins J A, Jones S K, Finkelstein I J, Press W H. Indel-correcting DNA barcodes for high-throughput sequencing. Proc Natl Acad Sci USA. 2018. doi:10.1073/pnas.1802640115
[0553] 26. Morgens D W, Wainberg M, Boyle E A, et al. Genome-scale measurement of off-target activity using Cas9 toxicity in high-throughput screens. Nat Commun. 2017. doi:10.1038/ncomms15178
[0554] 27. Hsiau T, Maures T, Waite K, et al. Inference of CRISPR Edits from Sanger Trace Data. bioRxiv. 2018. doi:10.1101/251082

[0555] The various embodiments described above can be combined to provide further embodiments. All of the U.S. patents, U.S. patent application publications, U.S. patent applications, foreign patents, foreign patent applications and non-patent publications referred to in this specification and/or listed in the Application Data Sheet, including but not limited to U.S. Provisional Application No. 62/971,873 filed on Feb. 7, 2020, are incorporated herein by reference, in their entirety. Aspects of the embodiments can be modified, if necessary to employ concepts of the various patents, applications and publications to provide yet further embodiments.

[0556] These and other changes can be made to the embodiments in light of the above-detailed description. In general, in the following claims, the terms used should not be construed to limit the claims to the specific embodiments disclosed in the specification and the claims, but should be construed to include all possible embodiments along with the full scope of equivalents to which such claims are entitled. Accordingly, the claims are not limited by the disclosure.

1. An isolated nucleic acid comprising an expression construct encoding an inhibitory nucleic acid that inhibits expression or activity of ATXN2, wherein the inhibitory nucleic acid comprises a guide strand sequence comprising the nucleic acid sequence set forth in any one of SEQ ID NOS: 4, 6, 8, 10, 12, 14, 16, 18, 20, 22, 24, 26, 28, 30, 32, 34, 36, 38, 40, 42, 44, 46, 48, 50, 52, 54, 56, 58, 60, 62, 64, 66, 68, 70, 72, 74, 76, 78, 80, 82, 84, 86, 88, 90, 92, 94, 96, 98, 100, 102, 104, 106, 108, 110, 112, 114, 116, 118, 120, 124, 126, 128, 130, 132, 134, 136, 138, 140, 142, 144, 146, 148, 150, 152, 154, 156, 158, 160, 162, 164, 166, 168, 170, 172, 174, 176, 178, 180, 182, 184, 186, 188, 190, 192, 194, 196, 198, 200, 202, 204, 206, 208, 210, 212, 214, 216, 218, 220, 222, 224, 226, 228, 230, 232, 234, 236, 238, 240, 242, 244, 246, 248, 250, 252, 254, 256, 258, 260, 262, 264, 266, 268, 270, 272, 274, 276, 278, 280, 282, 284, 286, 288, 290, 292, 294, 296, 298, 300, 302, 304, 306, 308, 310, 312, 314, 316, 318, 320, 324, 326, 328, 330, 332, 334, 336, 338, 340, 342, 344, 346, 348, 350, 352, 354, 356, 358, 360, 362, 364, 366, 368, 370, 372, 374, 376, 378, 380, 382, 384, 386, 388, 390, 392, 394, 396, 398, 400, 402, 404, 406, 408, 410, 412, 414, 416, 418, 420, 422, 424, 426, 428, 430, 432, 434, 436, 1176-1288, 1811-1827, 2015, 2065, 2083, 2152, 2203, and 2209.

2. (canceled)

3. The isolated nucleic acid molecule of claim 1, wherein the inhibitory nucleic acid is a siRNA duplex, shRNA, miRNA, or dsRNA.

4. The isolated nucleic acid molecule of claim 1, wherein the inhibitory nucleic acid further comprises a passenger strand sequence, optionally wherein the passenger strand sequence is selected from Tables 1, 19, 23, and 24, or a passenger strand sequence selected from Tables 1, 19, 23, and 24 and having 1-10 insertions, deletions, substitutions, mismatches, wobbles, or any combination thereof.

5. The isolated nucleic acid molecule of claim 4, wherein the inhibitory nucleic acid is an artificial miRNA, wherein the guide strand sequence and passenger strand sequence are contained within a miRNA backbone sequence.

6. (canceled)

7. The isolated nucleic acid molecule of claim 5, wherein the miRNA backbone sequence is a miR-155 backbone sequence, a miR-155E backbone sequence, a miR-155M backbone sequence, a miR1-1 backbone sequence, a miR-1-1_M backbone sequence, a miR-100 backbone sequence, a miR-100_M backbone sequence, a miR-190a backbone sequence, a miR-190a_M backbone sequence, a miR-124 backbone sequence, a miR-124_M backbone sequence, a miR-132 backbone sequence, a miR-9 backbone sequence, a miR-138-2 backbone sequence, a miR-122 backbone sequence, a miR-122_M backbone sequence, a miR-130a backbone sequence, a miR-16-2 backbone sequence, a miR-128 backbone sequence, a miR-144 backbone sequence, a miR-451a backbone sequence, or a miR-223 backbone sequence.

8. (canceled)

9. (canceled)

10. (canceled)

11. The isolated nucleic acid molecule of claim 1, wherein the inhibitory nucleic acid is a miRNA comprising the nucleic acid sequence set forth in any one of SEQ ID NOS: 443-490, 1109-1111, 1114, 1121-1168, 1405-1520, 1908-2007, 2011, 2017, 2021, 2025, 2027, 2031, 2035, 2039, 2041, 2045, 2049, 2053, 2057, 2061, 2067, 2071, 2075, 2079, 2085, 2089, 2093, 2097, 2101, 2105, 2109, 2113, 2117, 2120, 2124, 2128, 2132, 2136, 2140, 2144, 2148, 2154, 2158, 2162, 2166, 2170, 2174, 2176, 2180, 2182, 2184, 2187, 2189, 2191, 2193, 2195, 2197, 2199, 2205, 2211, 2261, 2263, 2265, and 2267.

12. (canceled)

13. The isolated nucleic acid molecule of claim 1, wherein the nucleic acid sequence encoding the inhibitory nucleic acid is located in an untranslated region of the expression construct.

14. (canceled)

15. The isolated nucleic acid molecule of claim 1, further comprising a promoter operably linked to the nucleic acid sequence encoding the inhibitory nucleic acid.

16. The isolated nucleic acid molecule of claim 15, wherein the promoter is a RNA pol III promoter, U6 promoter, H1 promoter, a chicken-beta actin (CBA) promoter, a CAG promoter, a H1 promoter, a CD68 promoter, a human synapsin promoter, or a JeT promoter.

17. The isolated nucleic acid molecule of claim 15, wherein the promoter is an H1 promoter comprising nucleotides 113-203 of SEQ ID NO:1522, nucleotides 1798-1888 of SEQ ID NO:1521, nucleotides 244-343 of SEQ ID NO:2257, or nucleotides 113-343 of SEQ ID NO:2257.

18. The isolated nucleic acid molecule of claim 1, wherein the expression construct is flanked by a 5′ adeno-associated virus (AAV) inverted terminal repeat (ITR) sequence and a 3′ AAV ITR sequence, or variants thereof.

19. The isolated nucleic acid molecule of claim 18, wherein one of the ITR sequences lacks a functional terminal resolution site.

20. The isolated nucleic acid molecule of claim 18, wherein the 5′ and 3′ ITRs are derived from an AAV serotype selected from the group consisting of: AAV1, AAV2, AAV5, AAV6, AAV6.2, AAV7, AAV8, AAV9, AAVRh10, AAV11, and variants thereof.

21. The isolated nucleic acid molecule of claim 18, wherein the 5′ ITR comprises nucleotides 1-106 of SEQ ID NO:2257 and the 3′ ITR comprises nucleotides 2192-2358 of SEQ ID NO:2257.

22. A vector comprising the isolated nucleic acid molecule of claim 1.

23. The vector of claim 16, wherein the vector is a plasmid or viral vector.

24. The vector of claim 23, wherein the viral vector is a recombinant adeno-associated virus (rAAV) vector or a Baculovirus vector.

25. The vector of claim 24, wherein the vector is a self-complementary rAAV vector.

26. The vector of claim 24, wherein the rAAV vector further comprises a stuffer sequence.

27. (canceled)

28. (canceled)

29. A recombinant adeno-associated (rAAV) particle comprising the isolated nucleic acid molecule of claim 1.

30. The rAAV particle of claim 29, wherein the rAAV particle comprises a capsid protein.

31. The rAAV particle of claim 30, wherein the capsid protein is capable of crossing the blood-brain barrier.

32. The rAAV particle of claim 30, wherein the capsid protein is an AAV9 capsid protein or AAVrh.10 capsid protein.

33. (canceled)

34. A pharmaceutical composition comprising the isolated nucleic acid molecule of claim 1, and optionally a pharmaceutically acceptable carrier.

35. A host cell comprising the isolated nucleic acid molecule of claim 1.

36. A method for treating a subject having or suspected of having a neurodegenerative disease, the method comprising administering to the subject the isolated nucleic acid molecule of claim 1.

37. The method of claim 36, wherein the administration comprises direct injection to the CNS of the subject.

38. The method of claim 37, wherein the direct injection is intracerebral injection, intraparenchymal injection, intrathecal injection, intrastriatal injection, subpial injection, direct injection to the cerebrospinal fluid (CSF) of the subject, intracistemal injection, intraventricular injection, intralumbar injection, or any combination thereof.

39. (canceled)

40. The method of claim 36, wherein the subject is characterized as having an ATXN2 allele having at least 22 CAG trinucleotide repeats, optionally wherein the ATXN2 allele has at least 24 CAG trinucleotide repeats, at least 27 CAG trinucleotide repeats, at least 30 CAG trinucleotide repeats, or at least 33 or more CAG trinucleotide repeats.

41. The method of claim 36, wherein the neurodegenerative disease is spinocerebellar ataxia-2, amyotrophic lateral sclerosis, frontotemporal dementia, primary lateral sclerosis, progressive muscular atrophy, limbic-predominant age-related TDP-43 encephalopathy, chronic traumatic encephalopathy, dementia with Lewy bodies, corticobasal degeneration, progressive supranuclear palsy (PSP), dementia Parkinsonism ALS complex of guam (G-PDC), Pick's disease, hippocampal sclerosis, Huntington's disease, Parkinson's disease, or Alzheimer's disease.

42. A method of inhibiting ATXN2 expression in a cell, the method comprising delivering to the cell the isolated nucleic acid of claim 1.

43. (canceled)

44. (canceled)

45. (canceled)

46. (canceled)

47. (canceled)

48. (canceled)

49. A method of inhibiting ATXN2 expression in the central nervous system of a subject, the method comprising administering to the subject the isolated nucleic acid of claim 1.

50. (canceled)

51. (canceled)

52. (canceled)

53. (canceled)

54. An artificial miRNA comprising a guide strand sequence and a passenger strand sequence, wherein the guide strand sequence comprises any one of SEQ ID NOS: 4, 6, 8, 10, 12, 14, 16, 18, 20, 22, 24, 26, 28, 30, 32, 34, 36, 38, 40, 42, 44, 46, 48, 50, 52, 54, 56, 58, 60, 62, 64, 66, 68, 70, 72, 74, 76, 78, 80, 82, 84, 86, 88, 90, 92, 94, 96, 98, 100, 102, 104, 106, 108, 110, 112, 114, 116, 118, 120, 124, 126, 128, 130, 132, 134, 136, 138, 140, 142, 144, 146, 148, 150, 152, 154, 156, 158, 160, 162, 164, 166, 168, 170, 172, 174, 176, 178, 180, 182, 184, 186, 188, 190, 192, 194, 196, 198, 200, 202, 204, 206, 208, 210, 212, 214, 216, 218, 220, 222, 224, 226, 228, 230, 232, 234, 236, 238, 240, 242, 244, 246, 248, 250, 252, 254, 256, 258, 260, 262, 264, 266, 268, 270, 272, 274, 276, 278, 280, 282, 284, 286, 288, 290, 292, 294, 296, 298, 300, 302, 304, 306, 308, 310, 312, 314, 316, 318, 320, 324, 326, 328, 330, 332, 334, 336, 338, 340, 342, 344, 346, 348, 350, 352, 354, 356, 358, 360, 362, 364, 366, 368, 370, 372, 374, 376, 378, 380, 382, 384, 386, 388, 390, 392, 394, 396, 398, 400, 402, 404, 406, 408, 410, 412, 414, 416, 418, 420, 422, 424, 426, 428, 430, 432, 434, 436, 1176-1288, 1811-1827, 2015, 2065, 2083, 2152, 2203, and 2209.

55. (canceled)

56. The artificial miRNA of claim 54, wherein the guide strand sequence and passenger strand sequence are contained within a miR backbone sequence.

57. The artificial miRNA of claim 56, wherein the miR backbone sequence is a miR-155 backbone sequence, a miR-155E backbone sequence, a miR-155M backbone sequence, a miR1-1 backbone sequence, a miR-1-1_M backbone sequence, a miR-16-2 backbone sequence, a miR-100 backbone sequence, a miR-100_M backbone sequence, a miR-190a backbone sequence, a miR-190a_M backbone sequence, a miR-124 backbone sequence, a miR-124_M backbone sequence, a miR-132 backbone sequence, a miR-9 backbone sequence, a miR-138-2 backbone sequence, a miR-122 backbone sequence, a miR-122_M backbone sequence, a miR-130a backbone sequence, or a miR-128 backbone sequence, a miR-144 backbone sequence, a miR-451a backbone sequence, or a miR-223 backbone sequence.

58. (canceled)

59. (canceled)

60. (canceled)

61. The artificial miRNA of claim 54, wherein the artificial miRNA comprises the sequence as set forth in any one of SEQ ID NOS: 443-490, 1109-1111, 1114, 1121-1168, 1405-1520, 1908-2007, 2011, 2017, 2021, 2025, 2027, 2031, 2035, 2039, 2041, 2045, 2049, 2053, 2057, 2061, 2067, 2071, 2075, 2079, 2085, 2089, 2093, 2097, 2101, 2105, 2109, 2113, 2117, 2120, 2124, 2128, 2132, 2136, 2140, 2144, 2148, 2154, 2158, 2162, 2166, 2170, 2174, 2176, 2180, 2182, 2184, 2187, 2189, 2191, 2193, 2195, 2197, 2199, 2205, 2211, 2261, 2263, 2265, and 2267.

62. An isolated RNA duplex comprising a guide strand sequence and a passenger strand sequence, wherein the guide strand sequence comprises the nucleic acid sequence set forth in any one of SEQ ID NOS: 4, 6, 8, 10, 12, 14, 16, 18, 20, 22, 24, 26, 28, 30, 32, 34, 36, 38, 40, 42, 44, 46, 48, 50, 52, 54, 56, 58, 60, 62, 64, 66, 68, 70, 72, 74, 76, 78, 80, 82, 84, 86, 88, 90, 92, 94, 96, 98, 100, 102, 104, 106, 108, 110, 112, 114, 116, 118, 120, 124, 126, 128, 130, 132, 134, 136, 138, 140, 142, 144, 146, 148, 150, 152, 154, 156, 158, 160, 162, 164, 166, 168, 170, 172, 174, 176, 178, 180, 182, 184, 186, 188, 190, 192, 194, 196, 198, 200, 202, 204, 206, 208, 210, 212, 214, 216, 218, 220, 222, 224, 226, 228, 230, 232, 234, 236, 238, 240, 242, 244, 246, 248, 250, 252, 254, 256, 258, 260, 262, 264, 266, 268, 270, 272, 274, 276, 278, 280, 282, 284, 286, 288, 290, 292, 294, 296, 298, 300, 302, 304, 306, 308, 310, 312, 314, 316, 318, 320, 324, 326, 328, 330, 332, 334, 336, 338, 340, 342, 344, 346, 348, 350, 352, 354, 356, 358, 360, 362, 364, 366, 368, 370, 372, 374, 376, 378, 380, 382, 384, 386, 388, 390, 392, 394, 396, 398, 400, 402, 404, 406, 408, 410, 412, 414, 416, 418, 420, 422, 424, 426, 428, 430, 432, 434, 436, and 1176-1288, 1811-1827, 2015, 2065, 2083, 2152, 2203, and 2209, optionally wherein the guide strand sequence and passenger strand sequence are linked by a loop region to form a hairpin structure comprising a duplex structure and a loop region.

63. (canceled)

The application's sequence listing, which the Patent Office published only in electronic form, follows.

SEQUENCE LISTING (2272 sequences)

SEQ ID NO: 1 - protein, 1153 aa, Homo sapiens
MSLKPQQQQQQQQQQQQQQQQQQQQQQQPPPAAANVRKPGGSGLLASPAAAPSPSSSSVSSSSATAPSSVVAATSGGGRPGLGRGRNSNKGLPQSTISFDGIYANMRMVHILTSVVGSKCEVQVKNGGIYEGVFKTYSPKCDLVLDAAHEKSTESSSGPKREEIMESILFKCSDFVVVQFKDMDSSYAKRDAFTDSAISAKVNGEHKEKDLEPWDAGELTANEELEALENDVSNGWDPNDMFRYNEENYGVVSTYDSSLSSYTVPLERDNSEEFLKREARANQLAEEIESSAQYKARVALENDDRSEEEKYTAVQRNSSEREGHSINTRENKYIPPGQRNREVISWGSGRQNSPRMGQPGSGSMPSRSTSHTSDFNPNSGSDQRVVNGGVPWPSPCPSPSSRPPSRYQSGPNSLPPRAATPTRPPSRPPSRPSRPPSHPSAHGSPAPVSTMPKRMSSEGPPRMSPKAQRHPRNHRVSAGRGSISSGLEFVSHNPPSEAATPPVARTSPSGGTWSSVVSGVPRLSPKTHRPRSPRQNSIGNTPSGPVLASPQAGIIPTEAVAMPIPAASPTPASPASNRAVTPSSEAKDSRLQDQRQNSPAGNKENIKPNETSPSFSKAENKGISPVVSEHRKQIDDLKKFKNDFRLQPSSTSESMDQLLNKNREGEKSRDLIKDKIEPSAKDSFIENSSSNCTSGSSKPNSPSISPSILSNTEHKRGPEVTSQGVQTSSPACKQEKDDKEEKKDAAEQVRKSTLNPNAKEFNPRSFSQPKPSTTPTSPRPQAQPSPSMVGHQQPTPVYTQPVCFAPNMMYPVPVSPGVQPLYPIPMTPMPVNQAKTYRAVPNMPQQRQDQHHQSAMMHPASAAGPPIAATPPAYSTQYVAYSPQQFPNQPLVQHVPHYQSQHPHVYSPVIQGNARMMAPPTHAQPGLVSSSATQYGAHEQTHAMYACPKLPYNKETSPSFYFAISTGSLAQQYAHPNATLHPHTPHPQPSATPTGQQQSQHGGSHPAPSPVQHHQHQAAQALHLASPQQQSAIYHAGLAPTPPSMTPASNTQSPQNSFPAAQQTVFTIHPSHVQPAYTNPPHMAHVPQAHVQSGMVPSHPTAHAPMMLMTTQPPGGPQAALAQSALQPIPVSTTAHFPYMTHPSVQAHHQQQL

SEQ ID NO: 2 - DNA, 4702 bp, Homo sapiens
acccccgagaaagcaacccagcgcgccgcccgctcctcacgtgtccctcccggccccggggccacctcacgttctgcttccgtctgacccctccgacttccggtaaagagtccctatccgcacctccgctcccacccggcgcctcggcgcgcccgccctccgatgcgctcagcggccgcagctcctcggagtcccgcggtggccaccgagtctcgccgcttcgccgcagccaggtggcccgggtggcgctcgctccagcggccggcgcggcggagcgggcggggcggcggtggcgcggccccgggaccgtatccctccgccgcccctcccccgcccggccccggcccccctccctcccggcagagctcgcctccctccgcctcagactgttttggtagcaacggcaacggcggcggcgcgtttcggcccggctcccggcggctccttggtctcggcgggcctccccgccccttcgtcgtcctccttctccccctcgccagcccgggcgcccctccggccgcgccaacccgcgcctccccgctcggcgcccgcgcgtccccgccgcgttccggcgtctccttggcgcgcccggctcccggctgtccccgcccggcgtgcgagccggtgtatgggcccctcaccatgtcgctgaagccccagcagcagcagcagcagcagcagcagcagcagcagcagcaacagcagcagcagcagcagcagcagcagccgccgcccgcggctgccaatgtccgcaagcccggcggcagcggccttctagcgtcgcccgccgccgcgccttcgccgtcctcgtcctcggtctcctcgtcctcggccacggctccctcctcggtggtcgcggcgacctccggcggcgggaggcccggcctgggcagaggtcgaaacagtaacaaaggactgcctcagtctacgatttcttttgatggaatctatgcaaatatgaggatggttcatatacttacatcagttgttggctccaaatgtgaagtacaagtgaaaaatggaggtatatatgaaggagtttttaaaacttacagtccgaagtgtgatttggtacttgatgccgcacatgagaaaagtacagaatccagttcggggccgaaacgtgaagaaataatggagagtattttgttcaaatgttcagactttgttgtggtacagtttaaagatatggactccagttatgcaaaaagagatgcttttactgactctgctatcagtgctaaagtgaatggcgaacacaaagagaaggacctggagccctgggatgcaggtgaactcacagccaatgaggaacttgaggctttggaaaatgacgtatctaatggatgggatcccaatgatatgtttcgatataatgaagaaaattatggtgtagtgtctacgtatgatagcagtttatcttcgtatacagtgcccttagaaagagataactcagaagaatttttaaaacgggaagcaagggcaaaccagttagcagaagaaattgagtcaagtgcccagtacaaagctcgagtggccctggaaaatgatgataggagtgaggaagaaaaatacacagcagttcagagaaattccagtgaacgtgaggggcacagcataaacactagggaaaataaatatattcctcctggacaaagaaatagagaagtcatatcctggggaagtgggagacagaattcaccgcgtatgggccagcctggatcgggctccatgccatcaagatccacttctcacacttcagatttcaacccgaattctggttcagaccaaagagtagttaatggaggtgttccctggccatcgccttgcccatctccttcctctcgcccaccttctcgctaccagtcaggtcccaactctcttccacctcgggcagccacccctacacggccgccctccaggcccccctcgcggccatccagacccccgtctcacccctctgctcatggttctccagctcctgtctctactatgcctaaacgcatgtcttcagaagggcctccaaggatgtccccaaaggcccagcgacatcctcgaaatcacagagtttctgctgggaggggttccatatccagtggcctagaatttgtatcccacaacccacccagtgaagcagctactcctccagtagcaaggaccagtccctcggggggaacgtggtcatcagtggtcagtggggttccaagattatcccctaaaactcatagacccaggtctcccagacagaacagtattggaaatacccccagtgggccagttcttgcttctccccaagctggtattattccaactgaagctgttgccatgcctattccagctgcatctcctacgcctgctagtcctgcatcgaacagagctgttaccccttctagtgaggctaaagattccaggcttcaagatcagaggcagaactctcctgcagggaataaagaaaatattaaacccaatgaaacatcacctagcttctcaaaagctgaaaacaaaggtatatcaccagttgtttctgaacatagaaaacagattgatgatttaaagaaatttaagaatgattttaggttacagccaagttctacttctgaatctatggatcaactactaaacaaaaatagagagggagaaaaatcaagagatttgatcaaagacaaaattgaaccaagtgctaaggattctttcattgaaaatagcagcagcaactgtaccagtggcagcagcaagccgaatagccccagcatttccccttcaatacttagtaacacggagcacaagaggggacctgaggtcacttcccaaggggttcagacttccagcccagcatgtaaacaagagaaagacgataaggaagagaagaaagacgcagctgagcaagttaggaaatcaacattgaatcccaatgcaaaggagttcaacccacgttccttctctcagccaaagccttctactaccccaacttcacctcggcctcaagcacaacctagcccatctatggtgggtcatcaacagccaactccagtttatactcagcctgtttgttttgcaccaaatatgatgtatccagtcccagtgagcccaggcgtgcaacctttatacccaatacctatgacgcccatgccagtgaatcaagccaagacatatagagcagtaccaaatatgccccaacagcggcaagaccagcatcatcagagtgccatgatgcacccagcgtcagcagcgggcccaccgattgcagccaccccaccagcttactccacgcaatatgttgcctacagtcctcagcagttcccaaatcagccccttgttcagcatgtgccacattatcagtctcagcatcctcatgtctatagtcctgtaatacagggtaatgctagaatgatggcaccaccaacacacgcccagcctggtttagtatcttcttcagcaactcagtacggggctcatgagcagacgcatgcgatgtatgcatgtcccaaattaccatacaacaaggagacaagcccttctttctactttgccatttccacgggctcccttgctcagcagtatgcgcaccctaacgctaccctgcacccacatactccacaccctcagccttcagctacccccactggacagcagcaaagccaacatggtggaagtcatcctgcacccagtcctgttcagcaccatcagcaccaggccgcccaggctctccatctggccagtccacagcagcagtcagccatttaccacgcggggcttgcgccaactccaccctccatgacacctgcctccaacacgcagtcgccacagaatagtttcccagcagcacaacagactgtctttacgatccatccttctcacgttcagccggcgtataccaacccaccccacatggcccacgtacctcaggctcatgtacagtcaggaatggttccttctcatccaactgcccatgcgccaatgatgctaatgacgacacagccacccggcggtccccaggccgccctcgctcaaagtgcactacagcccattccagtctcgacaacagcgcatttcccctatatgacgcacccttcagtacaagcccaccaccaacagcagttgtaaggctgccctggaggaaccgaaaggccaaattccctcctcccttctactgcttctaccaactggaagcacagaaaactagaatttcatttattttgtttttaaaatatatatgttgatttcttgtaacatccaataggaatgctaacagttcacttgcagtggaagatacttggaccgagtagaggcatttaggaacttgggggctattccataattccatatgctgtttcagagtcccgcaggtaccccagctctgcttgccgaaactggaagttatttattttttaataacccttgaaagtcatgaacacatcagctagcaaaagaagtaacaagagtgattcttgctgctattactgctaaaaaaaaaaaaaaaaaaaaatcaagacttggaacgcccttttactaaacttgacaaagtttcagtaaattcttaccgtcaaactgacggattattatttataaatcaagtttgatgaggtgatcactgtctacagtggttcaacttttaagttaagggaaaaacttttactttgtagataatataaaataaaaacttaaaaaaaatttaaaaaataaaaaaagttttaaaaactga

SEQ ID NO: 3 - RNA, 22 nt, Artificial Sequence
  XD-14738 sense sequence (passenger)
ccuccgccucagacuguuuugg

SEQ ID NO: 4 - RNA, 22 nt, Artificial Sequence
  XD-14738 antisense sequence (guide)
aaaacagucugaggcggaggga

SEQ ID NO: 5 - RNA, 22 nt, Artificial Sequence
  XD-14739 sense sequence (passenger)
cuccgccucagacuguuuuagu

SEQ ID NO: 6 - RNA, 22 nt, Artificial Sequence
  XD-14739 antisense sequence (guide)
uaaaacagucugaggcggaggg

SEQ ID NO: 7 - RNA, 22 nt, Artificial Sequence
  XD-14740 sense sequence (passenger)
cggcggcagcggccuucuaacg

SEQ ID NO: 8 - RNA, 22 nt, Artificial Sequence
  XD-14740 antisense sequence (guide)
uuagaaggccgcugccgccggg

SEQ ID NO: 9 - RNA, 22 nt, Artificial Sequence
  XD-14741 sense sequence (passenger)
ggacugccucagucuacgauuu

SEQ ID NO: 10 - RNA, 22 nt, Artificial Sequence
  XD-14741 antisense sequence (guide)
aucguagacugaggcaguccuu

SEQ ID NO: 11 - RNA, 22 nt, Artificial Sequence
  XD-14742 sense sequence (passenger)
cugccucagucuacgauuuauu

SEQ ID NO: 12 - RNA, 22 nt, Artificial Sequence
  XD-14742 antisense sequence (guide)
uaaaucguagacugaggcaguc

SEQ ID NO: 13 - RNA, 22 nt, Artificial Sequence
  XD-14743 sense sequence (passenger)
ugccucagucuacgauuucuuu

SEQ ID NO: 14 - RNA, 22 nt, Artificial Sequence
  XD-14743 antisense sequence (guide)
agaaaucguagacugaggcagu

SEQ ID NO: 15 - RNA, 22 nt, Artificial Sequence
  XD-14744 sense sequence (passenger)
ccucagucuacgauuucuuuug

SEQ ID NO: 16 - RNA, 22 nt, Artificial Sequence
  XD-14744 antisense sequence (guide)
aaagaaaucguagacugaggca

SEQ ID NO: 17 - RNA, 22 nt, Artificial Sequence
  XD-14745 sense sequence (passenger)
cagucuacgauuucuuuugaug

SEQ ID NO: 18 - RNA, 22 nt, Artificial Sequence
  XD-14745 antisense sequence (guide)
ucaaaagaaaucguagacugag

SEQ ID NO: 19 - RNA, 22 nt, Artificial Sequence
  XD-14746 sense sequence (passenger)
gaggaugguucauauacuuaca

SEQ ID NO: 20 - RNA, 22 nt, Artificial Sequence
  XD-14746 antisense sequence (guide)
uaaguauaugaaccauccucau

SEQ ID NO: 21 - RNA, 22 nt, Artificial Sequence
  XD-14747 sense sequence (passenger)
aggaugguucauauacuuaaau

SEQ ID NO: 22 - RNA, 22 nt, Artificial Sequence
  XD-14747 antisense sequence (guide)
uuaaguauaugaaccauccuca

SEQ ID NO: 23 - RNA, 22 nt, Artificial Sequence
  XD-14748 sense sequence (passenger)
ggaugguucauauacuuacauc

SEQ ID NO: 24 - RNA, 22 nt, Artificial Sequence
  XD-14748 antisense sequence (guide)
uguaaguauaugaaccauccuc

SEQ ID NO: 25 - RNA, 22 nt, Artificial Sequence
  XD-14749 sense sequence (passenger)
uucauauacuuacaucaguugu

SEQ ID NO: 26 - RNA, 22 nt, Artificial Sequence
  XD-14749 antisense sequence (guide)
aacugauguaaguauaugaacc

SEQ ID NO: 27 - RNA, 22 nt, Artificial Sequence
  XD-14750 sense sequence (passenger)
augagaaaaguacagaaucaag

SEQ ID NO: 28 - RNA, 22 nt, Artificial Sequence
  XD-14750 antisense sequence (guide)
ugauucuguacuuuucucaugu

SEQ ID NO: 29 - RNA, 22 nt, Artificial Sequence
  XD-14751 sense sequence (passenger)
gagaaaaguacagaauccaauu

SEQ ID NO: 30 - RNA, 22 nt, Artificial Sequence
  XD-14751 antisense sequence (guide)
uuggauucuguacuuuucucau

SEQ ID NO: 31 - RNA, 22 nt, Artificial Sequence
  XD-14752 sense sequence (passenger)
aaaguacagaauccaguucagg

SEQ ID NO: 32 - RNA, 22 nt, Artificial Sequence
  XD-14752 antisense sequence (guide)
ugaacuggauucuguacuuuuc

SEQ ID NO: 33 - RNA, 22 nt, Artificial Sequence
  XD-14753 sense sequence (passenger)
aaguacagaauccaguucgagg

SEQ ID NO: 34 - RNA, 22 nt, Artificial Sequence
  XD-14753 antisense sequence (guide)
ucgaacuggauucuguacuuuu

SEQ ID NO: 35 - RNA, 22 nt, Artificial Sequence
  XD-14754 sense sequence (passenger)
guacagaauccaguucgggacc

SEQ ID NO: 36 - RNA, 22 nt, Artificial Sequence
  XD-14754 antisense sequence (guide)
ucccgaacuggauucuguacuu

SEQ ID NO: 37 - RNA, 22 nt, Artificial Sequence
  XD-14755 sense sequence (passenger)
uacagaauccaguucggggacg

SEQ ID NO: 38 - RNA, 22 nt, Artificial Sequence
  XD-14755 antisense sequence (guide)
uccccgaacuggauucuguacu

SEQ ID NO: 39 - RNA, 22 nt, Artificial Sequence
  XD-14756 sense sequence (passenger)
ucagacuuuguugugguacagu

SEQ ID NO: 40 - RNA, 22 nt, Artificial Sequence
  XD-14756 antisense sequence (guide)
uguaccacaacaaagucugaac

SEQ ID NO: 41 - RNA, 22 nt, Artificial Sequence
  XD-14757 sense sequence (passenger)
uuuguugugguacaguuuaaag

SEQ ID NO: 42 - RNA, 22 nt, Artificial Sequence
  XD-14757 antisense sequence (guide)
uuaaacuguaccacaacaaagu

SEQ ID NO: 43 - RNA, 22 nt, Artificial Sequence
  XD-14758 sense sequence (passenger)
uuguugugguacaguuuaaaga

SEQ ID NO: 44 - RNA, 22 nt, Artificial Sequence
  XD-14758 antisense sequence (guide)
uuuaaacuguaccacaacaaag

SEQ ID NO: 45 - RNA, 22 nt, Artificial Sequence
  XD-14759 sense sequence (passenger)
ugugguacaguuuaaagauaug

SEQ ID NO: 46 - RNA, 22 nt, Artificial Sequence
  XD-14759 antisense sequence (guide)
uaucuuuaaacuguaccacaac

SEQ ID NO: 47 - RNA, 22 nt, Artificial Sequence
  XD-14760 sense sequence (passenger)
uuacugacucugcuaucagugc

SEQ ID NO: 48 - RNA, 22 nt, Artificial Sequence
  XD-14760 antisense sequence (guide)
acugauagcagagucaguaaaa

SEQ ID NO: 49 - RNA, 22 nt, Artificial Sequence
  XD-14761 sense sequence (passenger)
cugacucugcuaucagugcuaa

SEQ ID NO: 50 - RNA, 22 nt, Artificial Sequence
  XD-14761 antisense sequence (guide)
agcacugauagcagagucagua

SEQ ID NO: 51 - RNA, 22 nt, Artificial Sequence
  XD-14762 sense sequence (passenger)
ugacucugcuaucagugcuaaa

SEQ ID NO: 52 - RNA, 22 nt, Artificial Sequence
  XD-14762 antisense sequence (guide)
uagcacugauagcagagucagu

SEQ ID NO: 53 - RNA, 22 nt, Artificial Sequence
  XD-14763 sense sequence (passenger)
cuaaagugaauggcgaacaaaa

SEQ ID NO: 54 - RNA, 22 nt, Artificial Sequence
  XD-14763 antisense sequence (guide)
uuguucgccauucacuuuagca

SEQ ID NO: 55 - RNA, 22 nt, Artificial Sequence
  XD-14764 sense sequence (passenger)
aaagugaauggcgaacacaaag

SEQ ID NO: 56 - RNA, 22 nt, Artificial Sequence
  XD-14764 antisense sequence (guide)
uuguguucgccauucacuuuag

SEQ ID NO: 57 - RNA, 22 nt, Artificial Sequence
  XD-14765 sense sequence (passenger)
gugaauggcgaacacaaagaga

SEQ ID NO: 58 - RNA, 22 nt, Artificial Sequence
  XD-14765 antisense sequence (guide)
ucuuuguguucgccauucacuu

SEQ ID NO: 59 - RNA, 22 nt, Artificial Sequence
  XD-14766 sense sequence (passenger)
cuuuggaaaaugacguaucuaa

SEQ ID NO: 60 - RNA, 22 nt, Artificial Sequence
  XD-14766 antisense sequence (guide)
agauacgucauuuuccaaagcc

SEQ ID NO: 61 - RNA, 22 nt, Artificial Sequence
  XD-14767 sense sequence (passenger)
uuggaaaaugacguaucuaaug

SEQ ID NO: 62 - RNA, 22 nt, Artificial Sequence
  XD-14767 antisense sequence (guide)
uuagauacgucauuuuccaaag

SEQ ID NO: 63 - RNA, 22 nt, Artificial Sequence
  XD-14768 sense sequence (passenger)
ggaaaaugacguaucuaauaga

SEQ ID NO: 64 - RNA, 22 nt, Artificial Sequence
  XD-14768 antisense sequence (guide)
uauuagauacgucauuuuccaa

SEQ ID NO: 65 - RNA, 22 nt, Artificial Sequence
  XD-14769 sense sequence (passenger)
aaaugacguaucuaauggaugg

SEQ ID NO: 66 - RNA, 22 nt, Artificial Sequence
  XD-14769 antisense sequence (guide)
auccauuagauacgucauuuuc

SEQ ID NO: 67 - RNA, 22 nt, Artificial Sequence
  XD-14770 sense sequence (passenger)
augacguaucuaauggaugaga

SEQ ID NO: 68 - RNA, 22 nt, Artificial Sequence
  XD-14770 antisense sequence (guide)
ucauccauuagauacgucauuu

SEQ ID NO: 69 - RNA, 22 nt, Artificial Sequence
  XD-14771 sense sequence (passenger)
uaauggaugggaucccaauaau

SEQ ID NO: 70 - RNA, 22 nt, Artificial Sequence
  XD-14771 antisense sequence (guide)
uauugggaucccauccauuaga

SEQ ID NO: 71 - RNA, 22 nt, Artificial Sequence
  XD-14772 sense sequence (passenger)
aauggaugggaucccaaugaua

SEQ ID NO: 72 - RNA, 22 nt, Artificial Sequence
  XD-14772 antisense sequence (guide)
ucauugggaucccauccauuag

SEQ ID NO: 73 - RNA, 22 nt, Artificial Sequence
  XD-14773 sense sequence (passenger)
auauguuucgauauaaugaaga

SEQ ID NO: 74 - RNA, 22 nt, Artificial Sequence
  XD-14773 antisense sequence (guide)
uucauuauaucgaaacauauca

SEQ ID NO: 75 - RNA, 22 nt, Artificial Sequence
  XD-14774 sense sequence (passenger)
auguuucgauauaaugaagaaa

SEQ ID NO: 76 - RNA, 22 nt, Artificial Sequence
  XD-14774 antisense sequence (guide)
ucuucauuauaucgaaacauau

SEQ ID NO: 77 - RNA, 22 nt, Artificial Sequence
  XD-14775 sense sequence (passenger)
gucuacguaugauagcaguuua

SEQ ID NO: 78 - RNA, 22 nt, Artificial Sequence
  XD-14775 antisense sequence (guide)
aacugcuaucauacguagacac

SEQ ID NO: 79 - RNA, 22 nt, Artificial Sequence
  XD-14776 sense sequence (passenger)
cguauacagugcccuuagaaag

SEQ ID NO: 80 - RNA, 22 nt, Artificial Sequence
  XD-14776 antisense sequence (guide)
uucuaagggcacuguauacgaa

SEQ ID NO: 81 - RNA, 22 nt, Artificial Sequence
  XD-14777 sense sequence (passenger)
uauacagugcccuuagaaaaag

SEQ ID NO: 82 - RNA, 22 nt, Artificial Sequence
  XD-14777 antisense sequence (guide)
uuuucuaagggcacuguauacg

SEQ ID NO: 83 - RNA, 22 nt, Artificial Sequence
  XD-14778 sense sequence (passenger)
caagggcaaaccaguuagcaga

SEQ ID NO: 84 - RNA, 22 nt, Artificial Sequence
  XD-14778 antisense sequence (guide)
ugcuaacugguuugcccuugcu

SEQ ID NO: 85 - RNA, 22 nt, Artificial Sequence
  XD-14779 sense sequence (passenger)
agggcaaaccaguuagcagaag

SEQ ID NO: 86 - RNA, 22 nt, Artificial Sequence
  XD-14779 antisense sequence (guide)
ucugcuaacugguuugcccuug

SEQ ID NO: 87 - RNA, 22 nt, Artificial Sequence
  XD-14780 sense sequence (passenger)
ugagucaagugcccaguacaaa

SEQ ID NO: 88 - RNA, 22 nt, Artificial Sequence
  XD-14780 antisense sequence (guide)
uguacugggcacuugacucaau

SEQ ID NO: 89 - RNA, 22 nt, Artificial Sequence
  XD-14781 sense sequence (passenger)
gagucaagugcccaguacaaag

SEQ ID NO: 90 - RNA, 22 nt, Artificial Sequence
  XD-14781 antisense sequence (guide)
uuguacugggcacuugacucaa

SEQ ID NO: 91 - RNA, 22 nt, Artificial Sequence
  XD-14782 sense sequence (passenger)
gcccaguacaaagcucgagugg

SEQ ID NO: 92 - RNA, 22 nt, Artificial Sequence
  XD-14782 antisense sequence (guide)
acucgagcuuuguacugggcac

SEQ ID NO: 93 - RNA, 22 nt, Artificial Sequence
  XD-14783 sense sequence (passenger)
aagaaaaauacacagcaguuca

SEQ ID NO: 94 - RNA, 22 nt, Artificial Sequence
  XD-14783 antisense sequence (guide)
aacugcuguguauuuuucuucc

SEQ ID NO: 95 - RNA, 22 nt, Artificial Sequence
  XD-14784 sense sequence (passenger)
gaggggcacagcauaaacaaua

SEQ ID NO: 96 - RNA, 22 nt, Artificial Sequence
  XD-14784 antisense sequence (guide)
uuguuuaugcugugccccucac

SEQ ID NO: 97 - RNA, 22 nt, Artificial Sequence
  XD-14785 sense sequence (passenger)
agucauauccuggggaaguagg

SEQ ID NO: 98 - RNA, 22 nt, Artificial Sequence
  XD-14785 antisense sequence (guide)
uacuuccccaggauaugacuuc

SEQ ID NO: 99 - RNA, 22 nt, Artificial Sequence
  XD-14786 sense sequence (passenger)
gagacagaauucaccgcguaug

SEQ ID NO: 100 - RNA, 22 nt, Artificial Sequence
  XD-14786 antisense sequence (guide)
uacgcggugaauucugucuccc

SEQ ID NO: 101 - RNA, 22 nt, Artificial Sequence
  XD-14787 sense sequence (passenger)
agacagaauucaccgcguaugg

SEQ ID NO: 102 - RNA, 22 nt, Artificial Sequence
  XD-14787 antisense sequence (guide)
auacgcggugaauucugucucc

SEQ ID NO: 103 - RNA, 22 nt, Artificial Sequence
  XD-14788 sense sequence (passenger)
gacagaauucaccgcguauagg

SEQ ID NO: 104 - RNA, 22 nt, Artificial Sequence
  XD-14788 antisense sequence (guide)
uauacgcggugaauucugucuc

SEQ ID NO: 105 - RNA, 22 nt, Artificial Sequence
  XD-14789 sense sequence (passenger)
acagaauucaccgcguaugagc

SEQ ID NO: 106 - RNA, 22 nt, Artificial Sequence
  XD-14789 antisense sequence (guide)
ucauacgcggugaauucugucu

SEQ ID NO: 107 - RNA, 22 nt, Artificial Sequence
  XD-14790 sense sequence (passenger)
acuucagauuucaacccgaauu

SEQ ID NO: 108 - RNA, 22 nt, Artificial Sequence
  XD-14790 antisense sequence (guide)
uucggguugaaaucugaagugu

SEQ ID NO: 109 - RNA, 22 nt, Artificial Sequence
  XD-14791 sense sequence (passenger)
ucagaccaaagaguaguuaaug

SEQ ID NO: 110 - RNA, 22 nt, Artificial Sequence
  XD-14791 antisense sequence (guide)
uuaacuacucuuuggucugaac

SEQ ID NO: 111 - RNA, 22 nt, Artificial Sequence
  XD-14792 sense sequence (passenger)
cagaccaaagaguaguuaaugg

SEQ ID NO: 112 - RNA, 22 nt, Artificial Sequence
  XD-14792 antisense sequence (guide)
auuaacuacucuuuggucugaa

SEQ ID NO: 113 - RNA, 22 nt, Artificial Sequence
  XD-14793 sense sequence (passenger)
agaccaaagaguaguuaauaga

SEQ ID NO: 114 - RNA, 22 nt, Artificial Sequence
  XD-14793 antisense sequence (guide)
uauuaacuacucuuuggucuga

SEQ ID NO: 115 - RNA, 22 nt, Artificial Sequence
  XD-14794 sense sequence (passenger)
gaccaaagaguaguuaaugaag

SEQ ID NO: 116 - RNA, 22 nt, Artificial Sequence
  XD-14794 antisense sequence (guide)
ucauuaacuacucuuuggucug

SEQ ID NO: 117 - RNA, 22 nt, Artificial Sequence
  XD-14795 sense sequence (passenger)
ccaaagaguaguuaauggaagu

SEQ ID NO: 118 - RNA, 22 nt, Artificial Sequence
  XD-14795 antisense sequence (guide)
uuccauuaacuacucuuugguc

SEQ ID NO: 119 - RNA, 22 nt, Artificial Sequence
  XD-14796 sense sequence (passenger)
uguccccaaaggcccagcgaca

SEQ ID NO: 120 - RNA, 22 nt, Artificial Sequence
  XD-14796 antisense sequence (guide)
ucgcugggccuuuggggacauc

SEQ ID NO: 121 - RNA, 22 nt, Artificial Sequence
  XD-14797 sense sequence (passenger)
gcccagcgacauccucgaaauc

SEQ ID NO: 122 - RNA, 22 nt, Artificial Sequence
  XD-14797 antisense sequence (guide)
uuucgaggaugucgcugggccu

SEQ ID NO: 123 - RNA, 22 nt, Artificial Sequence
  XD-14798 sense sequence (passenger)
cccagcgacauccucgaaauca

SEQ ID NO: 124 - RNA, 22 nt, Artificial Sequence
  XD-14798 antisense sequence (guide)
auuucgaggaugucgcugggcc

SEQ ID NO: 125 - RNA, 22 nt, Artificial Sequence
  XD-14799 sense sequence (passenger)
ccagcgacauccucgaaauaac

SEQ ID NO: 126 - RNA, 22 nt, Artificial Sequence
  XD-14799 antisense sequence (guide)
uauuucgaggaugucgcugggc

SEQ ID NO: 127 - RNA, 22 nt, Artificial Sequence
  XD-14800 sense sequence (passenger)
agcgacauccucgaaaucaaag

SEQ ID NO: 128 - RNA, 22 nt, Artificial Sequence
  XD-14800 antisense sequence (guide)
uugauuucgaggaugucgcugg

SEQ ID NO: 129 - RNA, 22 nt, Artificial Sequence
  XD-14801 sense sequence (passenger)
gcgacauccucgaaaucacaga

SEQ ID NO: 130 - RNA, 22 nt, Artificial Sequence
  XD-14801 antisense sequence (guide)
ugugauuucgaggaugucgcug

SEQ ID NO: 131 - RNA, 22 nt, Artificial Sequence
  XD-14802 sense sequence (passenger)
ugcugggagggguuccauaucc

SEQ ID NO: 132 - RNA, 22 nt, Artificial Sequence
  XD-14802 antisense sequence (guide)
auauggaaccccucccagcaga

SEQ ID NO: 133 - RNA, 22 nt, Artificial Sequence
  XD-14803 sense sequence (passenger)
gcuacuccuccaguagcaaaga

SEQ ID NO: 134 - RNA, 22 nt, Artificial Sequence
  XD-14803 antisense sequence (guide)
uuugcuacuggaggaguagcug

SEQ ID NO: 135 - RNA, 22 nt, Artificial Sequence
  XD-14804 sense sequence (passenger)
ccuccaguagcaaggaccaauc

SEQ ID NO: 136 - RNA, 22 nt, Artificial Sequence
  XD-14804 antisense sequence (guide)
uugguccuugcuacuggaggag

SEQ ID NO: 137 - RNA, 22 nt, Artificial Sequence
  XD-14805 sense sequence (passenger)
guggucagugggguuccaaaau

SEQ ID NO: 138 - RNA, 22 nt, Artificial Sequence
  XD-14805 antisense sequence (guide)
uuuggaaccccacugaccacug

SEQ ID NO: 139 - RNA, 22 nt, Artificial Sequence
  XD-14806 sense sequence (passenger)
gugggguuccaagauuaucacc

SEQ ID NO: 140 - RNA, 22 nt, Artificial Sequence
  XD-14806 antisense sequence (guide)
ugauaaucuuggaaccccacug

SEQ ID NO: 141 - RNA, 22 nt, Artificial Sequence
  XD-14807 sense sequence (passenger)
uccaagauuauccccuaaaacu

SEQ ID NO: 142 - RNA, 22 nt, Artificial Sequence
  XD-14807 antisense sequence (guide)
uuuuaggggauaaucuuggaac

SEQ ID NO: 143 - RNA, 22 nt, Artificial Sequence
  XD-14808 sense sequence (passenger)
ccaagauuauccccuaaaaauc

SEQ ID NO: 144 - RNA, 22 nt, Artificial Sequence
  XD-14808 antisense sequence (guide)
uuuuuaggggauaaucuuggaa

SEQ ID NO: 145 - RNA, 22 nt, Artificial Sequence
  XD-14809 sense sequence (passenger)
caagauuauccccuaaaacuca

SEQ ID NO: 146 - RNA, 22 nt, Artificial Sequence
  XD-14809 antisense sequence (guide)
aguuuuaggggauaaucuugga

SEQ ID NO: 147 - RNA, 22 nt, Artificial Sequence
  XD-14810 sense sequence (passenger)
aagauuauccccuaaaacuaau

SEQ ID NO: 148 - RNA, 22 nt, Artificial Sequence
  XD-14810 antisense sequence (guide)
uaguuuuaggggauaaucuugg

SEQ ID NO: 149 - RNA, 22 nt, Artificial Sequence
  XD-14811 sense sequence (passenger)
agauuauccccuaaaacucaua

SEQ ID NO: 150 - RNA, 22 nt, Artificial Sequence
  XD-14811 antisense sequence (guide)
ugaguuuuaggggauaaucuug

SEQ ID NO: 151 - RNA, 22 nt, Artificial Sequence
  XD-14812 sense sequence (passenger)
gauuauccccuaaaacucauag

SEQ ID NO: 152 - RNA, 22 nt, Artificial Sequence
  XD-14812 antisense sequence (guide)
augaguuuuaggggauaaucuu

SEQ ID NO: 153 - RNA, 22 nt, Artificial Sequence
  XD-14813 sense sequence (passenger)
auuauccccuaaaacucauaga

SEQ ID NO: 154 - RNA, 22 nt, Artificial Sequence
  XD-14813 antisense sequence (guide)
uaugaguuuuaggggauaaucu

SEQ ID NO: 155 - RNA, 22 nt, Artificial Sequence
  XD-14814 sense sequence (passenger)
uauccccuaaaacucauagacc

SEQ ID NO: 156 - RNA, 22 nt, Artificial Sequence
  XD-14814 antisense sequence (guide)
ucuaugaguuuuaggggauaau

SEQ ID NO: 157 - RNA, 22 nt, Artificial Sequence
  XD-14815 sense sequence (passenger)
aacucauagacccaggucuacc

SEQ ID NO: 158 - RNA, 22 nt, Artificial Sequence
  XD-14815 antisense sequence (guide)
uagaccugggucuaugaguuuu

SEQ ID NO: 159 - RNA, 22 nt, Artificial Sequence
  XD-14816 sense sequence (passenger)
uccccaagcugguauuauuaca

SEQ ID NO: 160 - RNA, 22 nt, Artificial Sequence
  XD-14816 antisense sequence (guide)
uaauaauaccagcuuggggaga

SEQ ID NO: 161 - RNA, 22 nt, Artificial Sequence
  XD-14817 sense sequence (passenger)
ccccaagcugguauuauucaaa

SEQ ID NO: 162 - RNA, 22 nt, Artificial Sequence
  XD-14817 antisense sequence (guide)
ugaauaauaccagcuuggggag

SEQ ID NO: 163 - RNA, 22 nt, Artificial Sequence
  XD-14818 sense sequence (passenger)
caucuccuacgccugcuagucc

SEQ ID NO: 164 - RNA, 22 nt, Artificial Sequence
  XD-14818 antisense sequence (guide)
acuagcaggcguaggagaugca

SEQ ID NO: 165 - RNA, 22 nt, Artificial Sequence
  XD-14819 sense sequence (passenger)
ccugcuaguccugcaucgaaca

SEQ ID NO: 166 - RNA, 22 nt, Artificial Sequence
  XD-14819 antisense sequence (guide)
uucgaugcaggacuagcaggcg

SEQ ID NO: 167 - RNA, 22 nt, Artificial Sequence
  XD-14820 sense sequence (passenger)
ugcuaguccugcaucgaacaga

SEQ ID NO: 168 - RNA, 22 nt, Artificial Sequence
  XD-14820 antisense sequence (guide)
uguucgaugcaggacuagcagg

SEQ ID NO: 169 - RNA, 22 nt, Artificial Sequence
  XD-14821 sense sequence (passenger)
cugcaucgaacagagcuguuac

SEQ ID NO: 170 - RNA, 22 nt, Artificial Sequence
  XD-14821 antisense sequence (guide)
aacagcucuguucgaugcagga

SEQ ID NO: 171 - RNA, 22 nt, Artificial Sequence
  XD-14822 sense sequence (passenger)
gcaucgaacagagcuguuaacc

SEQ ID NO: 172 - RNA, 22 nt, Artificial Sequence
  XD-14822 antisense sequence (guide)
uuaacagcucuguucgaugcag

SEQ ID NO: 173 - RNA, 22 nt, Artificial Sequence
  XD-14823 sense sequence (passenger)
accccuucuagugaggcuaaag

SEQ ID NO: 174 - RNA, 22 nt, Artificial Sequence
  XD-14823 antisense sequence (guide)
uuagccucacuagaagggguaa

SEQ ID NO: 175 - RNA, 22 nt, Artificial Sequence
  XD-14824 sense sequence (passenger)
ccccuucuagugaggcuaaaga

SEQ ID NO: 176 - RNA, 22 nt, Artificial Sequence
  XD-14824 antisense sequence (guide)
uuuagccucacuagaaggggua

SEQ ID NO: 177 - RNA, 22 nt, Artificial Sequence
  XD-14825 sense sequence (passenger)
ccuucuagugaggcuaaagauu

SEQ ID NO: 178 - RNA, 22 nt, Artificial Sequence
  XD-14825 antisense sequence (guide)
ucuuuagccucacuagaagggg

SEQ ID NO: 179 - RNA, 22 nt, Artificial Sequence
  XD-14826 sense sequence (passenger)
uucuagugaggcuaaagauucc

SEQ ID NO: 180 - RNA, 22 nt, Artificial Sequence
  XD-14826 antisense sequence (guide)
aaucuuuagccucacuagaagg

SEQ ID NO: 181 - RNA, 22 nt, Artificial Sequence
  XD-14827 sense sequence (passenger)
aaugaaacaucaccuagcuucu

SEQ ID NO: 182 - RNA, 22 nt, Artificial Sequence
  XD-14827 antisense sequence (guide)
aagcuaggugauguuucauugg

SEQ ID NO: 183 - RNA, 22 nt, Artificial Sequence
  XD-14828 sense sequence (passenger)
acaucaccuagcuucucaaaag

SEQ ID NO: 184 - RNA, 22 nt, Artificial Sequence
  XD-14828 antisense sequence (guide)
uuugagaagcuaggugauguuu

SEQ ID NO: 185 - RNA, 22 nt, Artificial Sequence
  XD-14829 sense sequence (passenger)
aucaccuagcuucucaaaaacu

SEQ ID NO: 186 - RNA, 22 nt, Artificial Sequence
  XD-14829 antisense sequence (guide)
uuuuugagaagcuaggugaugu

SEQ ID NO: 187 - RNA, 22 nt, Artificial Sequence
  XD-14830 sense sequence (passenger)
ccuagcuucucaaaagcugaaa

SEQ ID NO: 188 - RNA, 22 nt, Artificial Sequence
  XD-14830 antisense sequence (guide)
ucagcuuuugagaagcuaggug

SEQ ID NO: 189 - RNA, 22 nt, Artificial Sequence
  XD-14831 sense sequence (passenger)
aaaacaaagguauaucaccagu

SEQ ID NO: 190 - RNA, 22 nt, Artificial Sequence
  XD-14831 antisense sequence (guide)
uggugauauaccuuuguuuuca

SEQ ID NO: 191 - RNA, 22 nt, Artificial Sequence
  XD-14832 sense sequence (passenger)
uaagaaugauuuuagguuaaag

SEQ ID NO: 192 - RNA, 22 nt, Artificial Sequence
  XD-14832 antisense sequence (guide)
uuaaccuaaaaucauucuuaaa

SEQ ID NO: 193 - RNA, 22 nt, Artificial Sequence
  XD-14833 sense sequence (passenger)
aagaaugauuuuagguuacagc

SEQ ID NO: 194 - RNA, 22 nt, Artificial Sequence
  XD-14833 antisense sequence (guide)
uguaaccuaaaaucauucuuaa

SEQ ID NO: 195 - RNA, 22 nt, Artificial Sequence
  XD-14834 sense sequence (passenger)
acuucugaaucuauggaucaac

SEQ ID NO: 196 - RNA, 22 nt, Artificial Sequence
  XD-14834 antisense sequence (guide)
ugauccauagauucagaaguag

SEQ ID NO: 197 - RNA, 22 nt, Artificial Sequence
  XD-14835 sense sequence (passenger)
ugaaucuauggaucaacuaaua

SEQ ID NO: 198 - RNA, 22 nt, Artificial Sequence
  XD-14835 antisense sequence (guide)
uuaguugauccauagauucaga

SEQ ID NO: 199 - RNA, 22 nt, Artificial Sequence
  XD-14836 sense sequence (passenger)
aucuauggaucaacuacuaaac

SEQ ID NO: 200 - RNA, 22 nt, Artificial Sequence
  XD-14836 antisense sequence (guide)
uuaguaguugauccauagauuc

SEQ ID NO: 201 - RNA, 22 nt, Artificial Sequence
  XD-14837 sense sequence (passenger)
ucuauggaucaacuacuaaaca

SEQ ID NO: 202 - RNA, 22 nt, Artificial Sequence
  XD-14837 antisense sequence (guide)
uuuaguaguugauccauagauu

SEQ ID NO: 203 - RNA, 22 nt, Artificial Sequence
  XD-14838 sense sequence (passenger)
uauggaucaacuacuaaacaaa

SEQ ID NO: 204 - RNA, 22 nt, Artificial Sequence
  XD-14838 antisense sequence (guide)
uguuuaguaguugauccauaga

SEQ ID NO: 205 - RNA, 22 nt, Artificial Sequence
  XD-14839 sense sequence (passenger)
auggaucaacuacuaaacaaaa

SEQ ID NO: 206 - RNA, 22 nt, Artificial Sequence
  XD-14839 antisense sequence (guide)
uuguuuaguaguugauccauag

SEQ ID NO: 207 - RNA, 22 nt, Artificial Sequence
  XD-14840 sense sequence (passenger)
uggaucaacuacuaaacaaaaa

SEQ ID NO: 208 - RNA, 22 nt, Artificial Sequence
  XD-14840 antisense sequence (guide)
uuuguuuaguaguugauccaua

SEQ ID NO: 209 - RNA, 22 nt, Artificial Sequence
  XD-14841 sense sequence (passenger)
ggaucaacuacuaaacaaaaau

SEQ ID NO: 210 - RNA, 22 nt, Artificial Sequence
  XD-14841 antisense sequence (guide)
uuuuguuuaguaguugauccau

SEQ ID NO: 211 - RNA, 22 nt, Artificial Sequence
  XD-14842 sense sequence (passenger)
gccgaauagccccagcauuucc

SEQ ID NO: 212 - RNA, 22 nt, Artificial Sequence
  XD-14842 antisense sequence (guide)
aaaugcuggggcuauucggcuu

SEQ ID NO: 213 - RNA, 22 nt, Artificial Sequence
  XD-14843 sense sequence (passenger)
cagcauuuccccuucaauaauu

SEQ ID NO: 214 - RNA, 22 nt, Artificial Sequence
  XD-14843 antisense sequence (guide)
uuauugaaggggaaaugcuggg

SEQ ID NO: 215 - RNA, 22 nt, Artificial Sequence
  XD-14844 sense sequence (passenger)
uuuccccuucaauacuuaguaa

SEQ ID NO: 216 - RNA, 22 nt, Artificial Sequence
  XD-14844 antisense sequence (guide)
acuaaguauugaaggggaaaug

SEQ ID NO: 217 - RNA, 22 nt, Artificial Sequence
  XD-14845 sense sequence (passenger)
uuccccuucaauacuuaguaac

SEQ ID NO: 218 - RNA, 22 nt, Artificial Sequence
  XD-14845 antisense sequence (guide)
uacuaaguauugaaggggaaau

SEQ ID NO: 219 - RNA, 22 nt, Artificial Sequence
  XD-14846 sense sequence (passenger)
uccccuucaauacuuaguaaca

SEQ ID NO: 220 - RNA, 22 nt, Artificial Sequence
  XD-14846 antisense sequence (guide)
uuacuaaguauugaaggggaaa

SEQ ID NO: 221 - RNA, 22 nt, Artificial Sequence
  XD-14847 sense sequence (passenger)
ccccuucaauacuuaguaaaac

SEQ ID NO: 222 - RNA, 22 nt, Artificial Sequence
  XD-14847 antisense sequence (guide)
uuuacuaaguauugaaggggaa

SEQ ID NO: 223 - RNA, 22 nt, Artificial Sequence
  XD-14848 sense sequence (passenger)
uucaauacuuaguaacacgaag

SEQ ID NO: 224 - RNA, 22 nt, Artificial Sequence
  XD-14848 antisense sequence (guide)
ucguguuacuaaguauugaagg

SEQ ID NO: 225 - RNA, 22 nt, Artificial Sequence
  XD-14849 sense sequence (passenger)
ucaauacuuaguaacacggagc

SEQ ID NO: 226 - RNA, 22 nt, Artificial Sequence
  XD-14849 antisense sequence (guide)
uccguguuacuaaguauugaag

SEQ ID NO: 227 - RNA, 22 nt, Artificial Sequence
  XD-14850 sense sequence (passenger)
auacuuaguaacacggagcaca

SEQ ID NO: 228 - RNA, 22 nt, Artificial Sequence
  XD-14850 antisense sequence (guide)
ugcuccguguuacuaaguauug

SEQ ID NO: 229 - RNA, 22 nt, Artificial Sequence
  XD-14851 sense sequence (passenger)
gucacuucccaagggguucaga

SEQ ID NO: 230 - RNA, 22 nt, Artificial Sequence
  XD-14851 antisense sequence (guide)
ugaaccccuugggaagugaccu

SEQ ID NO: 231 - RNA, 22 nt, Artificial Sequence
  XD-14852 sense sequence (passenger)
ccaagggguucagacuuccagc

SEQ ID NO: 232 - RNA, 22 nt, Artificial Sequence
  XD-14852 antisense sequence (guide)
uggaagucugaaccccuuggga

SEQ ID NO: 233 - RNA, 22 nt, Artificial Sequence
  XD-14853 sense sequence (passenger)
gacgcagcugagcaaguuaaga

SEQ ID NO: 234 - RNA, 22 nt, Artificial Sequence
  XD-14853 antisense sequence (guide)
uuaacuugcucagcugcgucuu

SEQ ID NO: 235 - RNA, 22 nt, Artificial Sequence
  XD-14854 sense sequence (passenger)
cugagcaaguuaggaaaucaac

SEQ ID NO: 236 - RNA, 22 nt, Artificial Sequence
  XD-14854 antisense sequence (guide)
ugauuuccuaacuugcucagcu

SEQ ID NO: 237 - RNA, 22 nt, Artificial Sequence
  XD-14855 sense sequence (passenger)
gagcaaguuaggaaaucaaaau

SEQ ID NO: 238 - RNA, 22 nt, Artificial Sequence
  XD-14855 antisense sequence (guide)
uuugauuuccuaacuugcucag

SEQ ID NO: 239 - RNA, 22 nt, Artificial Sequence
  XD-14856 sense sequence (passenger)
ccaaugcaaaggaguucaaacc

SEQ ID NO: 240 - RNA, 22 nt, Artificial Sequence
  XD-14856 antisense sequence (guide)
uuugaacuccuuugcauuggga

SEQ ID NO: 241 - RNA, 22 nt, Artificial Sequence
  XD-14857 sense sequence (passenger)
ggaguucaacccacguuccuuc

SEQ ID NO: 242 - RNA, 22 nt, Artificial Sequence
  XD-14857 antisense sequence (guide)
aggaacguggguugaacuccuu

SEQ ID NO: 243 - RNA, 22 nt, Artificial Sequence
  XD-14858 sense sequence (passenger)
ucucagccaaagccuucuaaua

SEQ ID NO: 244 - RNA, 22 nt, Artificial Sequence
  XD-14858 antisense sequence (guide)
uuagaaggcuuuggcugagaga

SEQ ID NO: 245 - RNA, 22 nt, Artificial Sequence
  XD-14859 sense sequence (passenger)
cagccaaagccuucuacuaacc

SEQ ID NO: 246 - RNA, 22 nt, Artificial Sequence
  XD-14859 antisense sequence (guide)
uuaguagaaggcuuuggcugag

SEQ ID NO: 247 - RNA, 22 nt, Artificial Sequence
  XD-14860 sense sequence (passenger)
agccaaagccuucuacuacacc

SEQ ID NO: 248 - RNA, 22 nt, Artificial Sequence
  XD-14860 antisense sequence (guide)
uguaguagaaggcuuuggcuga

SEQ ID NO: 249 - RNA, 22 nt, Artificial Sequence
  XD-14861 sense sequence (passenger)
gccaaagccuucuacuaccaca

SEQ ID NO: 250 - RNA, 22 nt, Artificial Sequence
  XD-14861 antisense sequence (guide)
ugguaguagaaggcuuuggcug

SEQ ID NO: 251 - RNA, 22 nt, Artificial Sequence
  XD-14862 sense sequence (passenger)
accccaacuucaccucggcauc

SEQ ID NO: 252 - RNA, 22 nt, Artificial Sequence
  XD-14862 antisense sequence (guide)
ugccgaggugaaguugggguag

SEQ ID NO: 253 - RNA, 22 nt, Artificial Sequence
  XD-14863 sense sequence (passenger)
ccccaacuucaccucggccuca

SEQ ID NO: 254 - RNA, 22 nt, Artificial Sequence
  XD-14863 antisense sequence (guide)
aggccgaggugaaguuggggua

SEQ ID NO: 255 - RNA, 22 nt, Artificial Sequence
  XD-14864 sense sequence (passenger)
cccaacuucaccucggccuaaa

SEQ ID NO: 256 - RNA, 22 nt, Artificial Sequence
  XD-14864 antisense sequence (guide)
uaggccgaggugaaguuggggu

SEQ ID NO: 257 - RNA, 22 nt, Artificial Sequence
  XD-14865 sense sequence (passenger)
acuucaccucggccucaagaac

SEQ ID NO: 258 - RNA, 22 nt, Artificial Sequence
  XD-14865 antisense sequence (guide)
ucuugaggccgaggugaaguug

SEQ ID NO: 259 - RNA, 22 nt, Artificial Sequence
  XD-14866 sense sequence (passenger)
accucggccucaagcacaaacu

SEQ ID NO: 260 - RNA, 22 nt, Artificial Sequence
  XD-14866 antisense sequence (guide)
uuugugcuugaggccgagguga

SEQ ID NO: 261 - RNA, 22 nt, Artificial Sequence
  XD-14867 sense sequence (passenger)
ccucggccucaagcacaacaua

SEQ ID NO: 262 - RNA, 22 nt, Artificial Sequence
  XD-14867 antisense sequence (guide)
uguugugcuugaggccgaggug

SEQ ID NO: 263 - RNA, 22 nt, Artificial Sequence
  XD-14868 sense sequence (passenger)
agcacaaccuagcccaucuaug

SEQ ID NO: 264 - RNA, 22 nt, Artificial Sequence
  XD-14868 antisense sequence (guide)
uagaugggcuagguugugcuug

SEQ ID NO: 265 - RNA, 22 nt, Artificial Sequence
  XD-14869 sense sequence (passenger)
gcacaaccuagcccaucuaugg

SEQ ID NO: 266 - RNA, 22 nt, Artificial Sequence
  XD-14869 antisense sequence (guide)
auagaugggcuagguugugcuu

SEQ ID NO: 267 - RNA, 22 nt, Artificial Sequence
  XD-14870 sense sequence (passenger)
acaaccuagcccaucuaugaug

SEQ ID NO: 268 - RNA, 22 nt, Artificial Sequence
  XD-14870 antisense sequence (guide)
ucauagaugggcuagguugugc

SEQ ID NO: 269 - RNA, 22 nt, Artificial Sequence
  XD-14871 sense sequence (passenger)
caaccuagcccaucuauggugg

SEQ ID NO: 270 - RNA, 22 nt, Artificial Sequence
  XD-14871 antisense sequence (guide)
accauagaugggcuagguugug

SEQ ID NO: 271 - RNA, 22 nt, Artificial Sequence
  XD-14872 sense sequence (passenger)
gcccaucuauggugggucauca

SEQ ID NO: 272 - RNA, 22 nt, Artificial Sequence
  XD-14872 antisense sequence (guide)
augacccaccauagaugggcua

SEQ ID NO: 273 - RNA, 22 nt, Artificial Sequence
  XD-14873 sense sequence (passenger)
cccaucuauggugggucauaaa

SEQ ID NO: 274 - RNA, 22 nt, Artificial Sequence
  XD-14873 antisense sequence (guide)
uaugacccaccauagaugggcu

SEQ ID NO: 275 - RNA, 22 nt, Artificial Sequence
  XD-14874 sense sequence (passenger)
ccaucuauggugggucaucaac

SEQ ID NO: 276 - RNA, 22 nt, Artificial Sequence
  XD-14874 antisense sequence (guide)
ugaugacccaccauagaugggc

SEQ ID NO: 277 - RNA, 22 nt, Artificial Sequence
  XD-14875 sense sequence (passenger)
caucuauggugggucaucaaca

SEQ ID NO: 278 - RNA, 22 nt, Artificial Sequence
  XD-14875 antisense sequence (guide)
uugaugacccaccauagauggg

SEQ ID NO: 279 - RNA, 22 nt, Artificial Sequence
  XD-14876 sense sequence (passenger)
gccaacuccaguuuauacuaag

SEQ ID NO: 280 - RNA, 22 nt, Artificial Sequence
  XD-14876 antisense sequence (guide)
uaguauaaacuggaguuggcug

SEQ ID NO: 281 - RNA, 22 nt, Artificial Sequence
  XD-14877 sense sequence (passenger)
caccaaauaugauguauccagu

SEQ ID NO: 282 - RNA, 22 nt, Artificial Sequence
  XD-14877 antisense sequence (guide)
uggauacaucauauuuggugca

SEQ ID NO: 283 - RNA, 22 nt, Artificial Sequence
  XD-14878 sense sequence (passenger)
agcccaggcgugcaaccuuuau

SEQ ID NO: 284 - RNA, 22 nt, Artificial Sequence
  XD-14878 antisense sequence (guide)
aaagguugcacgccugggcuca

SEQ ID NO: 285 - RNA, 22 nt, Artificial Sequence
  XD-14879 sense sequence (passenger)
uacccaauaccuaugacgcaca

SEQ ID NO: 286 - RNA, 22 nt, Artificial Sequence
  XD-14879 antisense sequence (guide)
ugcgucauagguauuggguaua

SEQ ID NO: 287 - RNA, 22 nt, Artificial Sequence
  XD-14880 sense sequence (passenger)
caauaccuaugacgcccauacc

SEQ ID NO: 288 - RNA, 22 nt, Artificial Sequence
  XD-14880 antisense sequence (guide)
uaugggcgucauagguauuggg

SEQ ID NO: 289 - RNA, 22 nt, Artificial Sequence
  XD-14881 sense sequence (passenger)
auaccuaugacgcccaugcaag

SEQ ID NO: 290 - RNA, 22 nt, Artificial Sequence
  XD-14881 antisense sequence (guide)
ugcaugggcgucauagguauug

SEQ ID NO: 291 - RNA, 22 nt, Artificial Sequence
  XD-14882 sense sequence (passenger)
gaaucaagccaagacauauaga

SEQ ID NO: 292 - RNA, 22 nt, Artificial Sequence
  XD-14882 antisense sequence (guide)
uauaugucuuggcuugauucac

SEQ ID NO: 293 - RNA, 22 nt, Artificial Sequence
  XD-14883 sense sequence (passenger)
aaucaagccaagacauauaaag

SEQ ID NO: 294 - RNA, 22 nt, Artificial Sequence
  XD-14883 antisense sequence (guide)
uuauaugucuuggcuugauuca

SEQ ID NO: 295 - RNA, 22 nt, Artificial Sequence
  XD-14884 sense sequence (passenger)
aucaagccaagacauauagagc

SEQ ID NO: 296 - RNA, 22 nt, Artificial Sequence
  XD-14884 antisense sequence (guide)
ucuauaugucuuggcuugauuc

SEQ ID NO: 297 - RNA, 22 nt, Artificial Sequence
  XD-14885 sense sequence (passenger)
aagccaagacauauagagcagu

SEQ ID NO: 298 - RNA, 22 nt, Artificial Sequence
  XD-14885 antisense sequence (guide)
ugcucuauaugucuuggcuuga

SEQ ID NO: 299 - RNA, 22 nt, Artificial Sequence
  XD-14886 sense sequence (passenger)
ccaaauaugccccaacagcagc

SEQ ID NO: 300 - RNA, 22 nt, Artificial Sequence
  XD-14886 antisense sequence (guide)
ugcuguuggggcauauuuggua

SEQ ID NO: 301 - RNA, 22 nt, Artificial Sequence
  XD-14887 sense sequence (passenger)
caaauaugccccaacagcgaca

SEQ ID NO: 302 - RNA, 22 nt, Artificial Sequence
  XD-14887 antisense sequence (guide)
ucgcuguuggggcauauuuggu

SEQ ID NO: 303 - RNA, 22 nt, Artificial Sequence
  XD-14888 sense sequence (passenger)
gcagcgggcccaccgauugaag

SEQ ID NO: 304 - RNA, 22 nt, Artificial Sequence
  XD-14888 antisense sequence (guide)
ucaaucggugggcccgcugcug

SEQ ID NO: 305 - RNA, 22 nt, Artificial Sequence
  XD-14889 sense sequence (passenger)
accagcuuacuccacgcaauau

SEQ ID NO: 306 - RNA, 22 nt, Artificial Sequence
  XD-14889 antisense sequence (guide)
auugcguggaguaagcuggugg

SEQ ID NO: 307 - RNA, 22 nt, Artificial Sequence
  XD-14890 sense sequence (passenger)
ccagcuuacuccacgcaauaug

SEQ ID NO: 308 - RNA, 22 nt, Artificial Sequence
  XD-14890 antisense sequence (guide)
uauugcguggaguaagcuggug

SEQ ID NO: 309 - RNA, 22 nt, Artificial Sequence
  XD-14891 sense sequence (passenger)
agcuuacuccacgcaauauauu

SEQ ID NO: 310 - RNA, 22 nt, Artificial Sequence
  XD-14891 antisense sequence (guide)
uauauugcguggaguaagcugg

SEQ ID NO: 311 - RNA, 22 nt, Artificial Sequence
  XD-14892 sense sequence (passenger)
uccacgcaauauguugccuaca

SEQ ID NO: 312 - RNA, 22 nt, Artificial Sequence
  XD-14892 antisense sequence (guide)
uaggcaacauauugcguggagu

SEQ ID NO: 313 - RNA, 22 nt, Artificial Sequence
  XD-14893 sense sequence (passenger)
agucucagcauccucauguaua

SEQ ID NO: 314 - RNA, 22 nt, Artificial Sequence
  XD-14893 antisense sequence (guide)
uacaugaggaugcugagacuga

SEQ ID NO: 315 - RNA, 22 nt, Artificial Sequence
  XD-14894 sense sequence (passenger)
cagcauccucaugucuauaauc

SEQ ID NO: 316 - RNA, 22 nt, Artificial Sequence
  XD-14894 antisense sequence (guide)
uuauagacaugaggaugcugag

SEQ ID NO: 317 - RNA, 22 nt, Artificial Sequence
  XD-14895 sense sequence (passenger)
guccuguaauacaggguaaugc

SEQ ID NO: 318 - RNA, 22 nt, Artificial Sequence
  XD-14895 antisense sequence (guide)
auuacccuguauuacaggacua

SEQ ID NO: 319 - RNA, 22 nt, Artificial Sequence
  XD-14896 sense sequence (passenger)
acaggguaaugcuagaaugaug

SEQ ID NO: 320 - RNA, 22 nt, Artificial Sequence
  XD-14896 antisense sequence (guide)
ucauucuagcauuacccuguau

SEQ ID NO: 321 - RNA, 22 nt, Artificial Sequence
  XD-14897 sense sequence (passenger)
acucaguacggggcucaugagc

SEQ ID NO: 322 - RNA, 22 nt, Artificial Sequence
  XD-14897 antisense sequence (guide)
ucaugagccccguacugaguug

SEQ ID NO: 323 - RNA, 22 nt, Artificial Sequence
  XD-14898 sense sequence (passenger)
gagcagacgcaugcgauguaug

SEQ ID NO: 324 - RNA, 22 nt, Artificial Sequence
  XD-14898 antisense sequence (guide)
uacaucgcaugcgucugcucau

SEQ ID NO: 325 - RNA, 22 nt, Artificial Sequence
  XD-14899 sense sequence (passenger)
agcagacgcaugcgauguaugc

SEQ ID NO: 326 - RNA, 22 nt, Artificial Sequence
  XD-14899 antisense sequence (guide)
auacaucgcaugcgucugcuca

SEQ ID NO: 327 - RNA, 22 nt, Artificial Sequence
  XD-14900 sense sequence (passenger)
gcagacgcaugcgauguauaca

SEQ ID NO: 328 - RNA, 22 nt, Artificial Sequence
  XD-14900 antisense sequence (guide)
uauacaucgcaugcgucugcuc

SEQ ID NO: 329 - RNA, 22 nt, Artificial Sequence
  XD-14901 sense sequence (passenger)
cuugcucagcaguaugcgcacc

SEQ ID NO: 330 - RNA, 22 nt, Artificial Sequence
  XD-14901 antisense sequence (guide)
ugcgcauacugcugagcaaggg

SEQ ID NO: 331 - RNA, 22 nt, Artificial Sequence
  XD-14902 sense sequence (passenger)
cagcaguaugcgcacccuaacg

SEQ ID NO: 332 - RNA, 22 nt, Artificial Sequence
  XD-14902 antisense sequence (guide)
uuagggugcgcauacugcugag

SEQ ID NO: 333 - RNA, 22 nt, Artificial Sequence
  XD-14903 sense sequence (passenger)
caguaugcgcacccuaacgaua

SEQ ID NO: 334 - RNA, 22 nt, Artificial Sequence
  XD-14903 antisense sequence (guide)
ucguuagggugcgcauacugcu

SEQ ID NO: 335 - RNA, 22 nt, Artificial Sequence
  XD-14904 sense sequence (passenger)
aguaugcgcacccuaacgcuac

SEQ ID NO: 336 - RNA, 22 nt, Artificial Sequence
  XD-14904 antisense sequence (guide)
agcguuagggugcgcauacugc

SEQ ID NO: 337 - RNA, 22 nt, Artificial Sequence
  XD-14905 sense sequence (passenger)
guaugcgcacccuaacgcuacc

SEQ ID NO: 338 - RNA, 22 nt, Artificial Sequence
  XD-14905 antisense sequence (guide)
uagcguuagggugcgcauacug

SEQ ID NO: 339 - RNA, 22 nt, Artificial Sequence
  XD-14906 sense sequence (passenger)
cagcagucagccauuuaccacg

SEQ ID NO: 340 - RNA, 22 nt, Artificial Sequence
  XD-14906 antisense sequence (guide)
ugguaaauggcugacugcugcu

SEQ ID NO: 341 - RNA, 22 nt, Artificial Sequence
  XD-14907 sense sequence (passenger)
agccauuuaccacgcggggauu

SEQ ID NO: 342 - RNA, 22 nt, Artificial Sequence
  XD-14907 antisense sequence (guide)
uccccgcgugguaaauggcuga

SEQ ID NO: 343 - RNA, 22 nt, Artificial Sequence
  XD-14908 sense sequence (passenger)
uccaacacgcagucgccacaga

SEQ ID NO: 344 - RNA, 22 nt, Artificial Sequence
  XD-14908 antisense sequence (guide)
uguggcgacugcguguuggagg

SEQ ID NO: 345 - RNA, 22 nt, Artificial Sequence
  XD-14909 sense sequence (passenger)
aacacgcagucgccacagaaua

SEQ ID NO: 346 - RNA, 22 nt, Artificial Sequence
  XD-14909 antisense sequence (guide)
uucuguggcgacugcguguugg

SEQ ID NO: 347 - RNA, 22 nt, Artificial Sequence
  XD-14910 sense sequence (passenger)
acgcagucgccacagaauaauu

SEQ ID NO: 348 - RNA, 22 nt, Artificial Sequence
  XD-14910 antisense sequence (guide)
uuauucuguggcgacugcgugu

SEQ ID NO: 349 - RNA, 22 nt, Artificial Sequence
  XD-14911 sense sequence (passenger)
gcagucgccacagaauaguuuc

SEQ ID NO: 350 - RNA, 22 nt, Artificial Sequence
  XD-14911 antisense sequence (guide)
aacuauucuguggcgacugcgu

SEQ ID NO: 351 - RNA, 22 nt, Artificial Sequence
  XD-14912 sense sequence (passenger)
acagaauaguuucccagcaaca

SEQ ID NO: 352 - RNA, 22 nt, Artificial Sequence
  XD-14912 antisense sequence (guide)
uugcugggaaacuauucugugg

SEQ ID NO: 353 - RNA, 22 nt, Artificial Sequence
  XD-14913 sense sequence (passenger)
aguuucccagcagcacaacaga

SEQ ID NO: 354 - RNA, 22 nt, Artificial Sequence
  XD-14913 antisense sequence (guide)
uguugugcugcugggaaacuau

SEQ ID NO: 355 - RNA, 22 nt, Artificial Sequence
  XD-14914 sense sequence (passenger)
acgauccauccuucucacguuc

SEQ ID NO: 356 - RNA, 22 nt, Artificial Sequence
  XD-14914 antisense sequence (guide)
acgugagaaggauggaucguaa

SEQ ID NO: 357 - RNA, 22 nt, Artificial Sequence
  XD-14915 sense sequence (passenger)
cucacguucagccggcguauac

SEQ ID NO: 358 - RNA, 22 nt, Artificial Sequence
  XD-14915 antisense sequence (guide)
auacgccggcugaacgugagaa

SEQ ID NO: 359 - RNA, 22 nt, Artificial Sequence
  XD-14916 sense sequence (passenger)
ucacguucagccggcguauacc

SEQ ID NO: 360 - RNA, 22 nt, Artificial Sequence
  XD-14916 antisense sequence (guide)
uauacgccggcugaacgugaga

SEQ ID NO: 361 - RNA, 22 nt, Artificial Sequence
  XD-14917 sense sequence (passenger)
acguucagccggcguauacaaa

SEQ ID NO: 362 - RNA, 22 nt, Artificial Sequence
  XD-14917 antisense sequence (guide)
uguauacgccggcugaacguga

SEQ ID NO: 363 - RNA, 22 nt, Artificial Sequence
  XD-14918 sense sequence (passenger)
cguucagccggcguauaccaac

SEQ ID NO: 364 - RNA, 22 nt, Artificial Sequence
  XD-14918 antisense sequence (guide)
ugguauacgccggcugaacgug

SEQ ID NO: 365 - RNA, 22 nt, Artificial Sequence
  XD-14919 sense sequence (passenger)
cccacauggcccacguaccuca

SEQ ID NO: 366 - RNA, 22 nt, Artificial Sequence
  XD-14919 antisense sequence (guide)
agguacgugggccauguggggu

SEQ ID NO: 367 - RNA, 22 nt, Artificial Sequence
  XD-14920 sense sequence (passenger)
ccacauggcccacguaccuaag

SEQ ID NO: 368 - RNA, 22 nt, Artificial Sequence
  XD-14920 antisense sequence (guide)
uagguacgugggccaugugggg

SEQ ID NO: 369 - RNA, 22 nt, Artificial Sequence
  XD-14921 sense sequence (passenger)
acauggcccacguaccucaagc

SEQ ID NO: 370 - RNA, 22 nt, Artificial Sequence
  XD-14921 antisense sequence (guide)
uugagguacgugggccaugugg

SEQ ID NO: 371 - RNA, 22 nt, Artificial Sequence
  XD-14922 sense sequence (passenger)
ccaacagcaguuguaaggcugc

SEQ ID NO: 372 - RNA, 22 nt, Artificial Sequence
  XD-14922 antisense sequence (guide)
agccuuacaacugcuguuggug

SEQ ID NO: 373 - RNA, 22 nt, Artificial Sequence
  XD-14923 sense sequence (passenger)
ucuuguaacauccaauaggaau

SEQ ID NO: 374 - RNA, 22 nt, Artificial Sequence
  XD-14923 antisense sequence (guide)
uccuauuggauguuacaagaaa

SEQ ID NO: 375 - RNA, 22 nt, Artificial Sequence
  XD-14924 sense sequence (passenger)
gaccgaguagaggcauuuaaga

SEQ ID NO: 376 - RNA, 22 nt, Artificial Sequence
  XD-14924 antisense sequence (guide)
uuaaaugccucuacucggucca

SEQ ID NO: 377 - RNA, 22 nt, Artificial Sequence
  XD-14925 sense sequence (passenger)
cgaguagaggcauuuaggaacu

SEQ ID NO: 378 - RNA, 22 nt, Artificial Sequence
  XD-14925 antisense sequence (guide)
uuccuaaaugccucuacucggu

SEQ ID NO: 379 - RNA, 22 nt, Artificial Sequence
  XD-14926 sense sequence (passenger)
ggaacuugggggcuauuccaua

SEQ ID NO: 380 - RNA, 22 nt, Artificial Sequence
  XD-14926 antisense sequence (guide)
uggaauagcccccaaguuccua

SEQ ID NO: 381 - RNA, 22 nt, Artificial Sequence
  XD-14927 sense sequence (passenger)
acuugggggcuauuccauaauu

SEQ ID NO: 382 - RNA, 22 nt, Artificial Sequence
  XD-14927 antisense sequence (guide)
uuauggaauagcccccaaguuc

SEQ ID NO: 383 - RNA, 22 nt, Artificial Sequence
  XD-14928 sense sequence (passenger)
uugggggcuauuccauaauucc

SEQ ID NO: 384 - RNA, 22 nt, Artificial Sequence
  XD-14928 antisense sequence (guide)
aauuauggaauagcccccaagu

SEQ ID NO: 385 - RNA, 22 nt, Artificial Sequence
  XD-14929 sense sequence (passenger)
gggggcuauuccauaauucaau

SEQ ID NO: 386 - RNA, 22 nt, Artificial Sequence
  XD-14929 antisense sequence (guide)
ugaauuauggaauagcccccaa

SEQ ID NO: 387 - RNA, 22 nt, Artificial Sequence
  XD-14930 sense sequence (passenger)
ggggcuauuccauaauuccaua

SEQ ID NO: 388 - RNA, 22 nt, Artificial Sequence
  XD-14930 antisense sequence (guide)
uggaauuauggaauagccccca

SEQ ID NO: 389 - RNA, 22 nt, Artificial Sequence
  XD-14931 sense sequence (passenger)
cucugcuugccgaaacuggaag

SEQ ID NO: 390 - RNA, 22 nt, Artificial Sequence
  XD-14931 antisense sequence (guide)
uccaguuucggcaagcagagcu

SEQ ID NO: 391 - RNA, 22 nt, Artificial Sequence
  XD-14932 sense sequence (passenger)
uugccgaaacuggaaguuauuu

SEQ ID NO: 392 - RNA, 22 nt, Artificial Sequence
  XD-14932 antisense sequence (guide)
auaacuuccaguuucggcaagc

SEQ ID NO: 393 - RNA, 22 nt, Artificial Sequence
  XD-14933 sense sequence (passenger)
auaacccuugaaagucaugaac

SEQ ID NO: 394 - RNA, 22 nt, Artificial Sequence
  XD-14933 antisense sequence (guide)
ucaugacuuucaaggguuauua

SEQ ID NO: 395 - RNA, 22 nt, Artificial Sequence
  XD-14934 sense sequence (passenger)
ugaacacaucagcuagcaaaag

SEQ ID NO: 396 - RNA, 22 nt, Artificial Sequence
  XD-14934 antisense sequence (guide)
uuugcuagcugauguguucaug

SEQ ID NO: 397 - RNA, 22 nt, Artificial Sequence
  XD-14935 sense sequence (passenger)
ugauucuugcugcuauuacugc

SEQ ID NO: 398 - RNA, 22 nt, Artificial Sequence
  XD-14935 antisense sequence (guide)
aguaauagcagcaagaaucacu

SEQ ID NO: 399 - RNA, 22 nt, Artificial Sequence
  XD-14936 sense sequence (passenger)
uggaacgcccuuuuacuaaacu

SEQ ID NO: 400 - RNA, 22 nt, Artificial Sequence
  XD-14936 antisense sequence (guide)
uuuaguaaaagggcguuccaag

SEQ ID NO: 401 - RNA, 22 nt, Artificial Sequence
  XD-14937 sense sequence (passenger)
ggaacgcccuuuuacuaaaauu

SEQ ID NO: 402 - RNA, 22 nt, Artificial Sequence
  XD-14937 antisense sequence (guide)
uuuuaguaaaagggcguuccaa

SEQ ID NO: 403 - RNA, 22 nt, Artificial Sequence
  XD-14938 sense sequence (passenger)
gaacgcccuuuuacuaaacuug

SEQ ID NO: 404 - RNA, 22 nt, Artificial Sequence
  XD-14938 antisense sequence (guide)
aguuuaguaaaagggcguucca

SEQ ID NO: 405 - RNA, 22 nt, Artificial Sequence
  XD-14939 sense sequence (passenger)
aacgcccuuuuacuaaacuuga

SEQ ID NO: 406 - RNA, 22 nt, Artificial Sequence
  XD-14939 antisense sequence (guide)
aaguuuaguaaaagggcguucc

SEQ ID NO: 407 - RNA, 22 nt, Artificial Sequence
  XD-14940 sense sequence (passenger)
aguaaauucuuaccgucaaacu

SEQ ID NO: 408 - RNA, 22 nt, Artificial Sequence
  XD-14940 antisense sequence (guide)
uuugacgguaagaauuuacuga

SEQ ID NO: 409 - RNA, 22 nt, Artificial Sequence
  XD-14941 sense sequence (passenger)
guaaauucuuaccgucaaaaug

SEQ ID NO: 410 - RNA, 22 nt, Artificial Sequence
  XD-14941 antisense sequence (guide)
uuuugacgguaagaauuuacug

SEQ ID NO: 411 - RNA, 22 nt, Artificial Sequence
  XD-14942 sense sequence (passenger)
ucuuaccgucaaacugacgaau

SEQ ID NO: 412 - RNA, 22 nt, Artificial Sequence
  XD-14942 antisense sequence (guide)
ucgucaguuugacgguaagaau

SEQ ID NO: 413 - RNA, 22 nt, Artificial Sequence
  XD-14943 sense sequence (passenger)
cuuaccgucaaacugacggauu

SEQ ID NO: 414 - RNA, 22 nt, Artificial Sequence
  XD-14943 antisense sequence (guide)
uccgucaguuugacgguaagaa

SEQ ID NO: 415 - RNA, 22 nt, Artificial Sequence
  XD-14944 sense sequence (passenger)
uuaccgucaaacugacggauua

SEQ ID NO: 416 - RNA, 22 nt, Artificial Sequence
  XD-14944 antisense sequence (guide)
auccgucaguuugacgguaaga

SEQ ID NO: 417 - RNA, 22 nt, Artificial Sequence
  XD-14945 sense sequence (passenger)
accgucaaacugacggauuauu

SEQ ID NO: 418 - RNA, 22 nt, Artificial Sequence
  XD-14945 antisense sequence (guide)
uaauccgucaguuugacgguaa

SEQ ID NO: 419 - RNA, 22 nt, Artificial Sequence
  XD-14946 sense sequence (passenger)
ccgucaaacugacggauuauua

SEQ ID NO: 420 - RNA, 22 nt, Artificial Sequence
  XD-14946 antisense sequence (guide)
auaauccgucaguuugacggua

SEQ ID NO: 421 - RNA, 22 nt, Artificial Sequence
  XD-14947 sense sequence (passenger)
cgucaaacugacggauuauuau

SEQ ID NO: 422 - RNA, 22 nt, Artificial Sequence
  XD-14947 antisense sequence (guide)
aauaauccgucaguuugacggu

SEQ ID NO: 423 - RNA, 22 nt, Artificial Sequence
  XD-14948 sense sequence (passenger)
gucaaacugacggauuauuauu

SEQ ID NO: 424 - RNA, 22 nt, Artificial Sequence
  XD-14948 antisense sequence (guide)
uaauaauccgucaguuugacgg

SEQ ID NO: 425 - RNA, 22 nt, Artificial Sequence
  XD-14949 sense sequence (passenger)
ucaaacugacggauuauuauuu

SEQ ID NO: 426 - RNA, 22 nt, Artificial Sequence
  XD-14949 antisense sequence (guide)
auaauaauccgucaguuugacg

SEQ ID NO: 427 - RNA, 22 nt, Artificial Sequence
  XD-14950 sense sequence (passenger)
acugacggauuauuauuuauaa

SEQ ID NO: 428 - RNA, 22 nt, Artificial Sequence
  XD-14950 antisense sequence (guide)
auaaauaauaauccgucaguuu

SEQ ID NO: 429 - RNA, 22 nt, Artificial Sequence
  XD-14951 sense sequence (passenger)
cugacggauuauuauuuauaaa

SEQ ID NO: 430 - RNA, 22 nt, Artificial Sequence
  XD-14951 antisense sequence (guide)
uauaaauaauaauccgucaguu

SEQ ID NO: 431 - RNA, 22 nt, Artificial Sequence
  XD-14952 sense sequence (passenger)
augaggugaucacugucuaaag

SEQ ID NO: 432 - RNA, 22 nt, Artificial Sequence
  XD-14952 antisense sequence (guide)
uuagacagugaucaccucauca

SEQ ID NO: 433 - RNA, 22 nt, Artificial Sequence
  XD-14953 sense sequence (passenger)
gaggugaucacugucuacaaug

SEQ ID NO: 434 - RNA, 22 nt, Artificial Sequence
  XD-14953 antisense sequence (guide)
uuguagacagugaucaccucau

SEQ ID NO: 435 - RNA, 22 nt, Artificial Sequence
  XD-14954 sense sequence (passenger)
cugucuacagugguucaacuuu

SEQ ID NO: 436 - RNA, 22 nt, Artificial Sequence
  XD-14954 antisense sequence (guide)
aguugaaccacuguagacagug

SEQ ID NO: 437 - RNA, 138 nt, Artificial Sequence
  XD-14857 amiRNA Sequence with miR-1-1 backbone (911 control)
caugcagacugccugcuugggauggaguucaagggacgucgccuuauggaccugcuaagcuaaggaacgucccuugaacuccuucucaggccgggaccucucucgccgcacugaggggcacuccacaccacgggggcc

SEQ ID NO: 438 - RNA, 136 nt, Artificial Sequence
  XD-14857 amiRNA Sequence (911 control)
cuggaggcuugcuuugggcuguaugcugaggaacgucccuugaacuccuuuuuuggccucugacugaaaggaguuaaggacguuccucaggacaaggcccuuuaucagcacucacauggaacaaauggccaccgug

SEQ ID NO: 439 - RNA, 136 nt, Artificial Sequence
  XD-14790 amiRNA Sequence with miR-155E backbone (911 control)
cuggaggcuugcuuugggcuguaugcuguucggguucuuaucugaaguguuuuuggccucugacugaacacuucaauagaacccgaacaggacaaggcccuuuaucagcacucacauggaacaaauggccaccgug

SEQ ID NO: 440 - RNA, 138 nt, Artificial Sequence
  XD-14790 amiRNA Sequence with miR-1-1 backbone (911 control)
caugcagacugccugcuugggagacuucagauaagaaccgagaauauggaccugcuaagcuauucggguucuuaucugaagugucucaggccgggaccucucucgccgcacugaggggcacuccacaccacgggggcc

SEQ ID NO: 441 - RNA, 136 nt, Artificial Sequence
  XD-14800 amiRNA Sequence with miR-155E backbone (911 control)
cuggaggcuugcuuugggcuguaugcuguugauuuccucgaugucgcugguuuuggccucugacugaccagcgacucgggaaaucaacaggacaaggcccuuuaucagcacucacauggaacaaauggccaccgug

SEQ ID NO: 442 - RNA, 138 nt, Artificial Sequence
  XD-14800 amiRNA Sequence with miR-1-1 backbone (911 control)
caugcagacugccugcuugggcgagcgacaucgaggaaacgcaauauggaccugcuaagcuauugauuuccucgaugucgcuggcucaggccgggaccucucucgccgcacugaggggcacuccacaccacgggggcc

SEQ ID NO: 443 - RNA, 138 nt, Artificial Sequence
  XD-14743 amiRNA Sequence with miR-1-1 backbone
caugcagacugccugcuugggagugccucagucuacgaucgucuuauggaccugcuaagcuaagaaaucguagacugaggcagucucaggccgggaccucucucgccgcacugaggggcacuccacaccacgggggcc

SEQ ID NO: 444 - RNA, 136 nt, Artificial Sequence
  XD-14743 amiRNA Sequence with miR-155E backbone
cuggaggcuugcuuugggcuguaugcugagaaaucguagacugaggcaguuuuuggccucugacugaacugccucgucacgauuucucaggacaaggcccuuuaucagcacucacauggaacaaauggccaccgug

SEQ ID NO: 445 - RNA, 138 nt, Artificial Sequence
  XD-14766 amiRNA Sequence with miR-1-1 backbone
caugcagacugccugcuuggggccuuuggaaaaugacguccucuuauggaccugcuaagcuaagauacgucauuuuccaaagcccucaggccgggaccucucucgccgcacugaggggcacuccacaccacgggggcc

SEQ ID NO: 446 - RNA, 136 nt, Artificial Sequence
  XD-14766 amiRNA Sequence with miR-155E backbone
cuggaggcuugcuuugggcuguaugcugagauacgucauuuuccaaagccuuuuggccucugacugaggcuuuggaaagacguaucucaggacaaggcccuuuaucagcacucacauggaacaaauggccaccgug

SEQ ID NO: 447 - RNA, 136 nt, Artificial Sequence
  XD-14904 amiRNA Sequence with miR-155E backbone
cuggaggcuugcuuugggcuguaugcugagcguuagggugcgcauacugcuuuuggccucugacugagcaguauggcaccuaacgcucaggacaaggcccuuuaucagcacucacauggaacaaauggccaccgug

SEQ ID NO: 448 - RNA, 138 nt, Artificial Sequence
  XD-14904 amiRNA Sequence with miR-1-1 backbone
caugcagacugccugcuugggggaguaugcgcacccuaagagcuuauggaccugcuaagcuaagcguuagggugcgcauacugccucaggccgggaccucucucgccgcacugaggggcacuccacaccacgggggcc

SEQ ID NO: 449 - RNA, 136 nt, Artificial Sequence
  XD-14857 amiRNA Sequence
cuggaggcuugcuuugggcuguaugcugaggaacguggguugaacuccuuuuuuggccucugacugaaaggaguuaaccacguuccucaggacaaggcccuuuaucagcacucacauggaacaaauggccaccgug

SEQ ID NO: 450 - RNA, 138 nt, Artificial Sequence
  XD-14857 amiRNA Sequence with miR-1-1 backbone
caugcagacugccugcuugggauggaguucaacccacgucgccuuauggaccugcuaagcuaaggaacguggguugaacuccuucucaggccgggaccucucucgccgcacugaggggcacuccacaccacgggggcc

SEQ ID NO: 451 - RNA, 136 nt, Artificial Sequence
  XD-14949 amiRNA Sequence with miR-155E backbone
cuggaggcuugcuuugggcuguaugcugauaauaauccgucaguuugacguuuuggccucugacugacgucaaacgacgauuauuaucaggacaaggcccuuuaucagcacucacauggaacaaauggccaccgug

SEQ ID NO: 452 - RNA, 138 nt, Artificial Sequence
  XD-14949 amiRNA Sequence with miR-1-1 backbone
caugcagacugccugcuugggccucaaacugacggauuacguauuauggaccugcuaagcuaauaauaauccgucaguuugacgcucaggccgggaccucucucgccgcacugaggggcacuccacaccacgggggcc

SEQ ID NO: 453 - RNA, 136 nt, Artificial Sequence
  XD-14787 amiRNA Sequence with miR-155E backbone
cuggaggcuugcuuugggcuguaugcugauacgcggugaauucugucuccuuuuggccucugacugaggagacagauuaccgcguaucaggacaaggcccuuuaucagcacucacauggaacaaauggccaccgug

SEQ ID NO: 454 - RNA, 138 nt, Artificial Sequence
  XD-14787 amiRNA Sequence with miR-1-1 backbone
caugcagacugccugcuuggggcagacagaauucaccgccuuauuauggaccugcuaagcuaauacgcggugaauucugucucccucaggccgggaccucucucgccgcacugaggggcacuccacaccacgggggcc

SEQ ID NO: 455 - RNA, 138 nt, Artificial Sequence
  XD-14792 amiRNA Sequence with miR-1-1 backbone
caugcagacugccugcuuggguacagaccaaagaguagucgaauuauggaccugcuaagcuaauuaacuacucuuuggucugaacucaggccgggaccucucucgccgcacugaggggcacuccacaccacgggggcc

SEQ ID NO: 456 - RNA, 136 nt, Artificial Sequence
  XD-14792 amiRNA Sequence with miR-155E backbone
cuggaggcuugcuuugggcuguaugcugauuaacuacucuuuggucugaauuuuggccucugacugauucagaccaagguaguuaaucaggacaaggcccuuuaucagcacucacauggaacaaauggccaccgug

SEQ ID NO: 457 - RNA, 136 nt, Artificial Sequence
  XD-14889 amiRNA Sequence with miR-155E backbone
cuggaggcuugcuuugggcuguaugcugauugcguggaguaagcuggugguuuuggccucugacugaccaccagcuacccacgcaaucaggacaaggcccuuuaucagcacucacauggaacaaauggccaccgug

SEQ ID NO: 458 - RNA, 138 nt, Artificial Sequence
  XD-14889 amiRNA Sequence with miR-1-1 backbone
caugcagacugccugcuugggcgaccagcuuacuccacggaaauuauggaccugcuaagcuaauugcguggaguaagcugguggcucaggccgggaccucucucgccgcacugaggggcacuccacaccacgggggcc

SEQ ID NO: 459 - RNA, 136 nt, Artificial Sequence
  XD-14798 amiRNA Sequence with miR-155E backbone
cuggaggcuugcuuugggcuguaugcugauuucgaggaugucgcugggccuuuuggccucugacugaggcccagcacaccucgaaaucaggacaaggcccuuuaucagcacucacauggaacaaauggccaccgug

SEQ ID NO: 460 - RNA, 138 nt, Artificial Sequence
  XD-14798 amiRNA Sequence with miR-1-1 backbone
caugcagacugccugcuuggggccccagcgacauccucgccaauuauggaccugcuaagcuaauuucgaggaugucgcugggcccucaggccgggaccucucucgccgcacugaggggcacuccacaccacgggggcc

SEQ ID NO: 461 - RNA, 138 nt, Artificial Sequence
  XD-14742 amiRNA Sequence with miR-1-1 backbone
caugcagacugccugcuuggggucugccucagucuacgacguuauauggaccugcuaagcuauaaaucguagacugaggcaguccucaggccgggaccucucucgccgcacugaggggcacuccacaccacgggggcc

SEQ ID NO: 462 - RNA, 136 nt, Artificial Sequence
  XD-14742 amiRNA Sequence with miR-155E backbone
cuggaggcuugcuuugggcuguaugcuguaaaucguagacugaggcagucuuuuggccucugacugagacugccuaguuacgauuuacaggacaaggcccuuuaucagcacucacauggaacaaauggccaccgug

SEQ ID NO: 463 - RNA, 138 nt, Artificial Sequence
  XD-14786 amiRNA Sequence with miR-1-1 backbone
caugcagacugccugcuuggggcgagacagaauucaccggaguauauggaccugcuaagcuauacgcggugaauucugucuccccucaggccgggaccucucucgccgcacugaggggcacuccacaccacgggggcc

SEQ ID NO: 464 - RNA, 136 nt, Artificial Sequence
  XD-14786 amiRNA Sequence with miR-155E backbone
cuggaggcuugcuuugggcuguaugcuguacgcggugaauucugucucccuuuuggccucugacugagggagacaaaucaccgcguacaggacaaggcccuuuaucagcacucacauggaacaaauggccaccgug

SEQ ID NO: 465 - RNA, 138 nt, Artificial Sequence
  XD-14788 amiRNA Sequence with miR-1-1 backbone
caugcagacugccugcuuggggugacagaauucaccgcgcgauauauggaccugcuaagcuauauacgcggugaauucugucuccucaggccgggaccucucucgccgcacugaggggcacuccacaccacgggggcc

SEQ ID NO: 466 - RNA, 136 nt, Artificial Sequence
  XD-14788 amiRNA Sequence with miR-155E backbone
cuggaggcuugcuuugggcuguaugcuguauacgcggugaauucugucucuuuuggccucugacugagagacagauucccgcguauacaggacaaggcccuuuaucagcacucacauggaacaaauggccaccgug

SEQ ID NO: 467 - RNA, 138 nt, Artificial Sequence
  XD-14890 amiRNA Sequence with miR-1-1 backbone
caugcagacugccugcuugggcuccagcuuacuccacgcccauauauggaccugcuaagcuauauugcguggaguaagcuggugcucaggccgggaccucucucgccgcacugaggggcacuccacaccacgggggcc

SEQ ID NO: 468 - RNA, 136 nt, Artificial Sequence
  XD-14890 amiRNA Sequence with miR-155E backbone
cuggaggcuugcuuugggcuguaugcuguauugcguggaguaagcugguguuuuggccucugacugacaccagcuacucacgcaauacaggacaaggcccuuuaucagcacucacauggaacaaauggccaccgug

SEQ ID NO: 469 - RNA, 136 nt, Artificial Sequence
  XD-14799 amiRNA Sequence with miR-155E backbone
cuggaggcuugcuuugggcuguaugcuguauuucgaggaugucgcugggcuuuuggccucugacugagcccagcgcaucucgaaauacaggacaaggcccuuuaucagcacucacauggaacaaauggccaccgug

SEQ ID NO: 470 - RNA, 138 nt, Artificial Sequence
  XD-14799 amiRNA Sequence with miR-1-1 backbone
caugcagacugccugcuugggggccagcgacauccucgaccauauauggaccugcuaagcuauauuucgaggaugucgcugggccucaggccgggaccucucucgccgcacugaggggcacuccacaccacgggggcc

SEQ ID NO: 471 - RNA, 138 nt, Artificial Sequence
  XD-14887 amiRNA Sequence with miR-1-1 backbone
caugcagacugccugcuugggagcaaauaugccccaacacucgauauggaccugcuaagcuaucgcuguuggggcauauuuggucucaggccgggaccucucucgccgcacugaggggcacuccacaccacgggggcc

SEQ ID NO: 472 - RNA, 136 nt, Artificial Sequence
  XD-14887 amiRNA Sequence with miR-155E backbone
cuggaggcuugcuuugggcuguaugcugucgcuguuggggcauauuugguuuuuggccucugacugaaccaaauagcccaacagcgacaggacaaggcccuuuaucagcacucacauggaacaaauggccaccgug

SEQ ID NO: 473 - RNA, 138 nt, Artificial Sequence
  XD-14901 amiRNA Sequence with miR-1-1 backbone
caugcagacugccugcuugggcgcuugcucagcaguauggagcauauggaccugcuaagcuaugcgcauacugcugagcaagggcucaggccgggaccucucucgccgcacugaggggcacuccacaccacgggggcc

SEQ ID NO: 474 - RNA, 136 nt, Artificial Sequence
  XD-14901 amiRNA Sequence with miR-155E backbone
cuggaggcuugcuuugggcuguaugcugugcgcauacugcugagcaaggguuuuggccucugacugacccuugcuagcguaugcgcacaggacaaggcccuuuaucagcacucacauggaacaaauggccaccgug

SEQ ID NO: 475 - RNA, 138 nt, Artificial Sequence
  XD-14756 amiRNA Sequence with miR-1-1 backbone
caugcagacugccugcuuggggaucagacuuuguuguggcgacauauggaccugcuaagcuauguaccacaacaaagucugaaccucaggccgggaccucucucgccgcacugaggggcacuccacaccacgggggcc

SEQ ID NO: 476 - RNA, 136 nt, Artificial Sequence
  XD-14756 amiRNA Sequence with miR-155E backbone
cuggaggcuugcuuugggcuguaugcuguguaccacaacaaagucugaacuuuuggccucugacugaguucagacuugugugguacacaggacaaggcccuuuaucagcacucacauggaacaaauggccaccgug

SEQ ID NO: 477 - RNA, 138 nt, Artificial Sequence
  XD-14917 amiRNA Sequence with miR-1-1 backbone
caugcagacugccugcuugggugacguucagccggcguacgacauauggaccugcuaagcuauguauacgccggcugaacgugacucaggccgggaccucucucgccgcacugaggggcacuccacaccacgggggcc

SEQ ID NO: 478 - RNA, 136 nt, Artificial Sequence
  XD-14917 amiRNA Sequence with miR-155E backbone
cuggaggcuugcuuugggcuguaugcuguguauacgccggcugaacgugauuuuggccucugacugaucacguucgccgcguauacacaggacaaggcccuuuaucagcacucacauggaacaaauggccaccgug

SEQ ID NO: 479 - RNA, 136 nt, Artificial Sequence
  XD-14846 amiRNA Sequence with miR-155E backbone
cuggaggcuugcuuugggcuguaugcuguuacuaaguauugaaggggaaauuuuggccucugacugauuuccccucaaacuuaguaacaggacaaggcccuuuaucagcacucacauggaacaaauggccaccgug

SEQ ID NO: 480 - RNA, 138 nt, Artificial Sequence
  XD-14846 amiRNA Sequence with miR-1-1 backbone
caugcagacugccugcuuggguauccccuucaauacuuacuuaauauggaccugcuaagcuauuacuaaguauugaaggggaaacucaggccgggaccucucucgccgcacugaggggcacuccacaccacgggggcc

SEQ ID NO: 481 - RNA, 138 nt, Artificial Sequence
  XD-14835 amiRNA Sequence with miR-1-1 backbone
caugcagacugccugcuugggugugaaucuauggaucaagauaauauggaccugcuaagcuauuaguugauccauagauucagacucaggccgggaccucucucgccgcacugaggggcacuccacaccacgggggcc

SEQ ID NO: 482 - RNA, 136 nt, Artificial Sequence
  XD-14835 amiRNA Sequence with miR-155E backbone
cuggaggcuugcuuugggcuguaugcuguuaguugauccauagauucagauuuuggccucugacugaucugaaucaugaucaacuaacaggacaaggcccuuuaucagcacucacauggaacaaauggccaccgug

SEQ ID NO: 483 - RNA, 136 nt, Artificial Sequence
  XD-14819 amiRNA Sequence with miR-155E backbone
cuggaggcuugcuuugggcuguaugcuguucgaugcaggacuagcaggcguuuuggccucugacugacgccugcugucugcaucgaacaggacaaggcccuuuaucagcacucacauggaacaaauggccaccgug

SEQ ID NO: 484 - RNA, 138 nt, Artificial Sequence
  XD-14819 amiRNA Sequence with miR-1-1 backbone
caugcagacugccugcuugggccccugcuaguccugcaugagaauauggaccugcuaagcuauucgaugcaggacuagcaggcgcucaggccgggaccucucucgccgcacugaggggcacuccacaccacgggggcc

SEQ ID NO: 485 - RNA, 136 nt, Artificial Sequence
  XD-14790 amiRNA Sequence with miR-155E backbone
cuggaggcuugcuuugggcuguaugcuguucggguugaaaucugaaguguuuuuggccucugacugaacacuucaauucaacccgaacaggacaaggcccuuuaucagcacucacauggaacaaauggccaccgug

SEQ ID NO: 486 - RNA, 138 nt, Artificial Sequence
  XD-14790 amiRNA Sequence with miR-1-1 backbone
caugcagacugccugcuugggagacuucagauuucaaccgagaauauggaccugcuaagcuauucggguugaaaucugaagugucucaggccgggaccucucucgccgcacugaggggcacuccacaccacgggggcc

SEQ ID NO: 487 - RNA, 138 nt, Artificial Sequence
  XD-14800 amiRNA Sequence with miR-1-1 backbone
caugcagacugccugcuugggcgagcgacauccucgaaacgcaauauggaccugcuaagcuauugauuucgaggaugucgcuggcucaggccgggaccucucucgccgcacugaggggcacuccacaccacgggggcc

SEQ ID NO: 488 - RNA, 136 nt, Artificial Sequence
  XD-14800 amiRNA Sequence with miR-155E backbone
cuggaggcuugcuuugggcuguaugcuguugauuucgaggaugucgcugguuuuggccucugacugaccagcgacucccgaaaucaacaggacaaggcccuuuaucagcacucacauggaacaaauggccaccgug

SEQ ID NO: 489 - RNA, 136 nt, Artificial Sequence
  XD-14781 amiRNA Sequence with miR-155E backbone
cuggaggcuugcuuugggcuguaugcuguuguacugggcacuugacucaauuuuggccucugacugauugagucagugccaguacaacaggacaaggcccuuuaucagcacucacauggaacaaauggccaccgug

SEQ ID NO: 490 - RNA, 138 nt, Artificial Sequence
  XD-14781 amiRNA Sequence with miR-1-1 backbone
caugcagacugccugcuuggguagagucaagugcccagucccaauauggaccugcuaagcuauuguacugggcacuugacucaacucaggccgggaccucucucgccgcacugaggggcacuccacaccacgggggcc

SEQ ID NO: 491 - DNA, 17 bp, Artificial Sequence
  miR-1-1 backbone 5'miR context (flanking segment)
catgcagactgcctgct

SEQ ID NO: 492 - DNA, 4 bp, Artificial Sequence
  miR-1-1 backbone 5' basal stem
tggg

SEQ ID NO: 493 - DNA, 18 bp, Artificial Sequence
  miR-1-1 backbone terminal loop
tatggacctgctaagcta

SEQ ID NO: 494 - DNA, 4 bp, Artificial Sequence
  miR-1-1 backbone 3' basal stem
ctca

SEQ ID NO: 495 - DNA, 51 bp, Artificial Sequence
  miR-1-1 backbone 3' miR context (flanking segment)
ggccgggacctctctcgccgcactgaggggcactccacaccacgggggccg

SEQ ID NO: 496 - DNA, 24 bp, Artificial Sequence
  miR-100 backbone 5' miR context (flanking segment)
cccaaaagagagaagatattgagg

SEQ ID NO: 497 - DNA, 12 bp, Artificial Sequence
  miR-100 backbone 5' basal stem
cctgttgccaca

SEQ ID NO: 498 - DNA, 11 bp, Artificial Sequence
  miR-100 backbone terminal loop
gtattagtccg

SEQ ID NO: 499 - DNA, 13 bp, Artificial Sequence
  miR-100 backbone 3' basal stem
tgtgtctgttagg

SEQ ID NO: 500 - DNA, 34 bp, Artificial Sequence
  miR-100 backbone 3' miR context (flanking segment)
caatctcacggacctggggctttgcttatatgcc

SEQ ID NO: 501 - DNA, 13 bp, Artificial Sequence
  miR-122 backbone 5'miR context (flanking segment)
ggctacagagttt

SEQ ID NO: 502 - DNA, 14 bp, Artificial Sequence
  miR-122 backbone 5' basal stem
ccttagcagagctg

SEQ ID NO: 503 - DNA, 12 bp, Artificial Sequence
  miR-122 backbone terminal loop
tgtctaaactat

SEQ ID NO: 504 - DNA, 15 bp, Artificial Sequence
  miR-122 backbone 3' basal stem
tagctactgctaggc

SEQ ID NO: 505 - DNA, 40 bp, Artificial Sequence
  miR-122 backbone 3' miR context (flanking segment)
aatccttccctcgataaatgtcttggcatcgtttgctttg

SEQ ID NO: 506 - DNA, 17 bp, Artificial Sequence
  miR-124 backbone 5'miR context (flanking segment)
ttccttcctcaggagaa

SEQ ID NO: 507 - DNA, 11 bp, Artificial Sequence
  miR-124 backbone 5' basal stem
aggcctctctc

SEQ ID NO: 508 - DNA, 19 bp, Artificial Sequence
  miR-124 backbone Terminal loop
atttaaatgtccatacaat

SEQ ID NO: 509 - DNA, 11 bp, Artificial Sequence
  miR-124 backbone 3' basal stem
gaatggggctg

SEQ ID NO: 510 - DNA, 36 bp, Artificial Sequence
  miR-124 backbone 3' miR context (flanking segment)
gctgagcaccgtgggtcggcgagggcccgccaagga

SEQ ID NO: 511 - DNA, 25 bp, Artificial Sequence
  miR-128 backbone 5'miR context (flanking segment)
attttgcaataattggccttgttcc

SEQ ID NO: 512 - DNA, 12 bp, Artificial Sequence
  miR-128 backbone 5' basal stem
tgagctgttgga

SEQ ID NO: 513 - DNA, 14 bp, Artificial Sequence
  miR-128 backbone terminal loop
gaggtttacatttc

SEQ ID NO: 514 - DNA, 12 bp, Artificial Sequence
  miR-128 backbone 3' basal stem
ttcagctgcttc

SEQ ID NO: 515 - DNA, 31 bp, Artificial Sequence
  miR-128 backbone 3' miR context (flanking segment)
ctggcttctttttactcaggtttccactgct

SEQ ID NO: 516 - DNA, 18 bp, Artificial Sequence
  miR-130a backbone 5'miR context (flanking segment)
gcagggccggcatgcctc

SEQ ID NO: 517 - DNA, 12 bp, Artificial Sequence
  miR-130a backbone 5' basal stem
tgctgctggcca

SEQ ID NO: 518 - DNA, 20 bp, Artificial Sequence
  miR-130a backbone terminal loop
ctgtctgcacctgtcactag

SEQ ID NO: 519 - DNA, 13 bp, Artificial Sequence
  miR-130a backbone 3' basal stem
tggccgtgtagtg

SEQ ID NO: 520 - DNA, 31 bp, Artificial Sequence
  miR-130a backbone 3' miR context (flanking segment)
ctacccagcgctggctgcctcctcagcattg

SEQ ID NO: 521 - DNA, 15 bp, Artificial Sequence
  miR-155E backbone 5'miR context (flanking segment)
ctggaggcttgcttt

SEQ ID NO: 522 - DNA, 13 bp, Artificial Sequence
  miR-155E backbone 5' basal stem
gggctgtatgctg

SEQ ID NO: 523 - DNA, 17 bp, Artificial Sequence
  miR-155E backbone terminal loop
ttttggcctctgactga

SEQ ID NO: 524 - DNA, 13 bp, Artificial Sequence
  miR-155E backbone 3' basal stem
caggacaaggccc

SEQ ID NO: 525 - DNA, 36 bp, Artificial Sequence
  miR-155E backbone 3' miR context (flanking segment)
tttatcagcactcacatggaacaaatggccaccgtg

SEQ ID NO: 526 - DNA, 16 bp, Artificial Sequence
  miR-155-M backbone 5'miR context (flanking segment)
cctggaggcttgctga

SEQ ID NO: 527 - DNA, 13 bp, Artificial Sequence
  miR-155-M backbone 5' basal stem
aggctgtatgctg

SEQ ID NO: 528 - DNA, 17 bp, Artificial Sequence
  miR-155-M backbone terminal loop
ttttggccactgactga

SEQ ID NO: 529 - DNA, 14 bp, Artificial Sequence
  miR-155-M backbone 3' basal stem
caggacacaaggcc

SEQ ID NO: 530 - DNA, 34 bp, Artificial Sequence
  miR-155-M backbone 3' miR context (flanking segment)
tgttactagcactcacatggaacaaatggccacc

SEQ ID NO: 531 - DNA, 19 bp, Artificial Sequence
  miR-138-2 backbone 5'miR context (flanking segment)
gccggcggagttctggtat

SEQ ID NO: 532 - DNA, 9 bp, Artificial Sequence
  miR-138-2 backbone 5' basal stem
cgttgctgc

SEQ ID NO: 533 - DNA, 24 bp, Artificial Sequence
  miR-138-2 backbone terminal loop
gacgagcagcgcatcctcttaccc

SEQ ID NO: 534 - DNA, 9 bp, Artificial Sequence
  miR-138-2 backbone 3' basal stem
gttgcatca

SEQ ID NO: 535 - DNA, 33 bp, Artificial Sequence
  miR-138-2 backbone 3' miR context (flanking segment)
tacccatcctctccaggcgagcctcgtgggacc

SEQ ID NO: 536 - DNA, 22 bp, Artificial Sequence
  luciferase control, siRNA sense sequence
ggaattataatgcttatctata

SEQ ID NO: 537 - DNA, 22 bp, Artificial Sequence
  luciferase control siRNA antisense sequence
tagataagcattataattccta

SEQ ID NO: 538 - DNA, 138 bp, Artificial Sequence
  miRNA  XD-14792_miR1-1 backbone
catgcagactgcctgcttgggtacagaccaaagagtagtcgaattatggacctgctaagctaattaactactctttggtctgaactcaggccgggacctctctcgccgcactgaggggcactccacaccacgggggcc

SEQ ID NO: 539 - DNA, 138 bp, Artificial Sequence
  miRNA  XD-14792_miR1-1 enhanced backbone
catgcagactgcctgcttgggtacagaccaaagagtagtcgaattatggacctgctaagctaattaactactctttggtctgaactcaggccgggacctcttccgccgcactgaggggcactccacaccacgggggcc

SEQ ID NO: 540 - DNA, 138 bp, Artificial Sequence
  miRNA XD-14792_miR155 backbone
cctggaggcttgctgaaggctgtatgctgattaactactctttggtctgaattttggccactgactgattcagaccaaggtagttaatcaggacacaaggcctgttactagcactcacatggaacaaatggccaccgg

SEQ ID NO: 541 - DNA, 138 bp, Artificial Sequence
  miRNA XD14792_911_miR155 backbone
cctggaggcttgctgaaggctgtatgctgattaactagagtttggtctgaattttggccactgactgattcagaccaacctagttaatcaggacacaaggcctgttactagcactcacatggaacaaatggccaccgg

SEQ ID NO: 542 - DNA, 138 bp, Artificial Sequence
  miRNA XD-14792_SScr miR155 backbone
cctggaggcttgctgaaggctgtatgctgattaactaagtatcggtctcttttttggccactgactgaaagagaccatattagttaatcaggacacaaggcctgttactagcactcacatggaacaaatggccaccgg

SEQ ID NO: 543 - DNA, 138 bp, Artificial Sequence
  miRNA XD-14792_miR155 sealed backbone
cctggaggcttgctgaaggctgtatgctgattaactactctttggtctgaattttggccactgactgattcagaccaaagagtagttaatcaggacacaaggcctgttactagcactcacatggaacaaatggccacc

SEQ ID NO: 544 - RNA, 22 nt, Artificial Sequence
  XD14792 911 Control Guide Sequence
auuaacuagaguuuggucugaa

SEQ ID NO: 545 - RNA, 22 nt, Artificial Sequence
  ATXN2 SScr Guide Sequence
auuaacuaaguaucggucucuu

SEQ ID NO: 546 - DNA, 9527 bp, Artificial Sequence
  pLVX_EF1A_mCherry-miR-1-1_XD-14890-WPRE_CMV_Puro plasmid
  misc_feature (1)..(635): 5' LTR
  misc_feature (681)..(806): Packaging signal
  misc_feature (1303)..(1536): RRE
  misc_feature (2356)..(2567): EF1A core promoter
  misc_feature (2568)..(3510): EF1A Intron
  misc_feature (3511)..(3520): Exon
  misc_feature (3536)..(3545): vertebrate consensus sequence for strong initiation of translation (Kozak, 1987)
  misc_feature (3542)..(4252): monomeric derivative of DsRed fluorescent protein (mCherry), mammalian codon-optimized
  misc_feature (4260)..(4274): Multiple cloning site
  misc_feature (4275)..(4291): 5' context miR1_1
  misc_feature (4292)..(4295): 5' basal stem
  misc_feature (4296)..(4318): Passenger strand
  misc_feature (4319)..(4336): Loop
  misc_feature (4337)..(4358): Guide Sequence XD-14890
  misc_feature (4359)..(4362): 3' basal stem
  misc_feature (4363)..(4412): 3' context miR1_1
  misc_feature (4413)..(4447): Adapter sequences
  misc_feature (4448)..(4521): MCS
  misc_feature (4522)..(5111): WPRE
  misc_feature (5123)..(5466): CMV promoter
  misc_feature (5479)..(6075): Puro
  misc_feature (6291)..(6924): 3' LTR
  misc_feature (8213)..(9073): AmpR
tggaagggctaattcactcccaaagaagacaagatatccttgatctgtggatctaccacacacaaggctacttccctgattagcagaactacacaccagggccaggggtcagatatccactgacctttggatggtgctacaagctagtaccagttgagccagataaggtagaagaggccaataaaggagagaacaccagcttgttacaccctgtgagcctgcatgggatggatgacccggagagagaagtgttagagtggaggtttgacagccgcctagcatttcatcacgtggcccgagagctgcatccggagtacttcaagaactgctgatatcgagcttgctacaagggactttccgctggggactttccagggaggcgtggcctgggcgggactggggagtggcgagccctcagatcctgcatataagcagctgctttttgcctgtactgggtctctctggttagaccagatctgagcctgggagctctctggctaactagggaacccactgcttaagcctcaataaagcttgccttgagtgcttcaagtagtgtgtgcccgtctgttgtgtgactctggtaactagagatccctcagacccttttagtcagtgtggaaaatctctagcagtggcgcccgaacagggacttgaaagcgaaagggaaaccagaggagctctctcgacgcaggactcggcttgctgaagcgcgcacggcaagaggcgaggggcggcgactggtgagtacgccaaaaattttgactagcggaggctagaaggagagagatgggtgcgagagcgtcagtattaagcgggggagaattagatcgcgatgggaaaaaattcggttaaggccagggggaaagaaaaaatataaattaaaacatatagtatgggcaagcagggagctagaacgattcgcagttaatcctggcctgttagaaacatcagaaggctgtagacaaatactgggacagctacaaccatcccttcagacaggatcagaagaacttagatcattatataatacagtagcaaccctctattgtgtgcatcaaaggatagagataaaagacaccaaggaagctttagacaagatagaggaagagcaaaacaaaagtaagaccaccgcacagcaagcggccggccgctgatcttcagacctggaggaggagatatgagggacaattggagaagtgaattatataaatataaagtagtaaaaattgaaccattaggagtagcacccaccaaggcaaagagaagagtggtgcagagagaaaaaagagcagtgggaataggagctttgttccttgggttcttgggagcagcaggaagcactatgggcgcagcgtcaatgacgctgacggtacaggccagacaattattgtctggtatagtgcagcagcagaacaatttgctgagggctattgaggcgcaacagcatctgttgcaactcacagtctggggcatcaagcagctccaggcaagaatcctggctgtggaaagatacctaaaggatcaacagctcctggggatttggggttgctctggaaaactcatttgcaccactgctgtgccttggaatgctagttggagtaataaatctctggaacagatttggaatcacacgacctggatggagtgggacagagaaattaacaattacacaagcttaatacactccttaattgaagaatcgcaaaaccagcaagaaaagaatgaacaagaattattggaattagataaatgggcaagtttgtggaattggtttaacataacaaattggctgtggtatataaaattattcataatgatagtaggaggcttggtaggtttaagaatagtttttgctgtactttctatagtgaatagagttaggcagggatattcaccattatcgtttcagacccacctcccaaccccgaggggacccgacaggcccgaaggaatagaagaagaaggtggagagagagacagagacagatccattcgattagtgaacggatctcgacggtatcgcctttaaaagaaaaggggggattggggggtacagtgcaggggaaagaatagtagacataatagcaacagacatacaaactaaagaattacaaaaacaaattacaaaaattcaaaattttcgggtttattacagggacagcagagatccagtttatcgatgagtaattcatacaaaaggactcgcccctgccttggggaatcccagggaccgtcgttaaactcccactaacgtagaacccagagatcgctgcgttcccgccccctcacccgcccgctctcgtcatcactgaggtggagaagagcatgcgtgaggctccggtgcccgtcagtgggcagagcgcacatcgcccacagtccccgagaagttggggggaggggtcggcaattgaaccggtgcctagagaaggtggcgcggggtaaactgggaaagtgatgtcgtgtactggctccgcctttttcccgagggtgggggagaaccgtatataagtgcagtagtcgccgtgaacgttctttttcgcaacgggtttgccgccagaacacaggtaagtgccgtgtgtggttcccgcgggcctggcctctttacgggttatggcccttgcgtgccttgaattacttccacgcccctggctgcagtacgtgattcttgatcccgagcttcgggttggaagtgggtgggagagttcgaggccttgcgcttaaggagccccttcgcctcgtgcttgagttgaggcctggcttgggcgctggggccgccgcgtgcgaatctggtggcaccttcgcgcctgtctcgctgctttcgataagtctctagccatttaaaatttttgatgacctgctgcgacgctttttttctggcaagatagtcttgtaaatgcgggccaagatctgcacactggtatttcggtttttggggccgcgggcggcgacggggcccgtgcgtcccagcgcacatgttcggcgaggcggggcctgcgagcgcggccaccgagaatcggacgggggtagtctcaagctggccggcctgctctggtgcctggcctcgcgccgccgtgtatcgccccgccctgggcggcaaggctggcccggtcggcaccagttgcgtgagcggaaagatggccgcttcccggccctgctgcagggagctcaaaatggaggacgcggcgctcgggagagcgggcgggtgagtcacccacacaaaggaaaagggcctttccgtcctcagccgtcgcttcatgtgactccacggagtaccgggcgccgtccaggcacctcgattagttctcgagcttttggagtacgtcgtctttaggttggggggaggggttttatgcgatggagtttccccacactgagtgggtggagactgaagttaggccagcttggcacttgatgtaattctccttggaatttgccctttttgagtttggatcttggttcattctcaagcctcagacagtggttcaaagtttttttcttccatttcaggtgtcgtgaggatctatttccggtggccaccatggtgagcaagggcgaggaggataacatggccatcatcaaggagttcatgcgcttcaaggtgcacatggagggctccgtgaacggccacgagttcgagatcgagggcgagggcgagggccgcccctacgagggcacccagaccgccaagctgaaggtgaccaagggtggccccctgcccttcgcctgggacatcctgtcccctcagttcatgtacggctccaaggcctacgtgaagcaccccgccgacatccccgactacttgaagctgtccttccccgagggcttcaagtgggagcgcgtgatgaacttcgaggacggcggcgtggtgaccgtgacccaggactcctctctccaggacggcgagttcatctacaaggtgaagctgcgcggcaccaacttcccctccgacggccccgtaatgcagaagaagaccatgggctgggaggcctcctccgagcggatgtaccccgaggacggcgctctgaaaggagagatcaagcagaggctgaagctgaaggacggcggccactacgacgctgaggtcaagaccacctacaaggccaagaagcccgtgcagctgcccggcgcctacaacgtcaacatcaagttggacatcacctcccacaacgaggactacaccatcgtggaacagtacgaacgcgccgagggacggcactccaccggaggaatggacgagctgtacaagtaagcctgcaggaattgcctagggtcatgcagactgcctgcttgggctccagcttactccacgcccatatatggacctgctaagctatattgcgtggagtaagctggtgctcaggccgggacctctctcgccgcactgaggggcactccacaccacgggggcccgtagcgttttgtacacgcctatacatcagtggttcactagtaagccaggtcgagacatgtttaagggttccggttccactaggtacaattcgataccagacttgtggataatcaacctgcaggtgacaaaatttgtgaaagattgactggtattcttaactatgttgctccttttacgctatgtggatacgctgctttaatgcctttgtatcatgctattgcttcccgtatggctttcattttctcctccttgtataaatcctggttgctgtctctttatgaggagttgtggcccgttgtcaggcaacgtggcgtggtgtgcactgtgtttgctgacgcaacccccactggttggggcattgccaccacctgtcagctcctttccgggactttcgctttccccctccctattgccacggcggaactcatcgccgcctgccttgcccgctgctggacaggggctcggctgttgggcactgacaattccgtggtgttgtcggggaaatcatcgtcctttccttggctgctcgcctgtgttgccacctggattctgcgcgggacgtccttctgctacgtcccttcggccctcaatccagcggaccttccttcccgcggcctgctgccggctctgcggcctcttccgcgtcttcgccttcgccctcagacgagtcggatctccctttgggccgcctccccgcatcggatcccgattatgcccagtacatgaccttatgggactttcctacttggcagtacatctacgtattagtcatcgctattaccatggtgatgcggttttggcagtacatcaatgggcgtggatagcggtttgactcacggggatttccaagtctccaccccattgacgccaatgggagtttgttttggcaccaaaatcaacgggactttccaaaatgtcgtaacaactccgccccattgacgcaaatgggcggtaggcgtgtacggtggaaggtttatataagcagagctcgtttagtgaaccgtcagatcgcctggagacgccatccacgctgttttgacctccatagaagacacgtggccaccatgaccgagtacaagcccacggtgcgcctcgccacccgcgacgacgtcccccgggccgtacgcaccctcgccgccgcgttcgccgactaccccgccacgcgccacaccgtcgacccggaccgccacatcgagcgggtcaccgagctgcaagaactcttcctcacgcgcgtcgggctcgacatcggcaaggtgtgggtcgcggacgacggcgccgcggtggcggtctggaccacgccggagagcgtcgaagcgggggcggtgttcgccgagatcggcccgcgcatggccgagttgagcggttcccggctggccgcgcagcaacagatggaaggcctcctggcgccgcaccggcccaaggagcccgcgtggttcctggccaccgtcggcgtctcgcccgaccaccagggcaagggtctgggcagcgccgtcgtgctccccggagtggaggcggccgagcgcgccggggtgcccgccttcctggagacctccgcgccccgcaacctccccttctacgagcggctcggcttcaccgtcaccgccgacgtcgaggtgcccgaaggaccgcgcacctggtgcatgacccgcaagcccggtgcctagacgcgtctggaattaattctgcagtcgagacctagaaaaacatggagcaatcacaagtagcaatacagcagctaccaatgctgattgtgcctggctagaagcacaagaggaggaggaggtgggttttccagtcacacctcaggtacctttaagaccaatgacttacaaggcagctgtagatcttagccactttttaaaagaaaagaggggactggaagggctaattcactcccaacgaagacaagatatccttgatctgtggatctaccacacacaaggctacttccctgattagcagaactacacaccagggccaggggtcagatatccactgacctttggatggtgctacaagctagtaccagttgagccagataaggtagaagaggccaataaaggagagaacaccagcttgttacaccctgtgagcctgcatgggatggatgacccggagagagaagtgttagagtggaggtttgacagccgcctagcatttcatcacgtggcccgagagctgcatccggagtacttcaagaactgctgatatcgagcttgctacaagggactttccgctggggactttccagggaggcgtggcctgggcgggactggggagtggcgagccctcagatcctgcatataagcagctgctttttgcctgtactgggtctctctggttagaccagatctgagcctgggagctctctggctaactagggaacccactgcttaagcctcaataaagcttgccttgagtgcttcaagtagtgtgtgcccgtctgttgtgtgactctggtaactagagatccctcagacccttttagtcagtgtggaaaatctctagcagtagtagttcatgtcatcttattattcagtatttataacttgcaaagaaatgaatatcagagagtgagaggccttgacattgctagcgtttaccgtcgacctctagctagagcttggcgtaatcatggtcatagctgtttcctgtgtgaaattgttatccgctcacaattccacacaacatacgagccggaagcataaagtgtaaagcctggggtgcctaatgagtgagctaactcacattaattgcgttgcgctcactgcccgctttccagtcgggaaacctgtcgtgccagctgcattaatgaatcggccaacgcgcggggagaggcggtttgcgtattgggcgctcttccgcttcctcgctcactgactcgctgcgctcggtcgttcggctgcggcgagcggtatcagctcactcaaaggcggtaatacggttatccacagaatcaggggataacgcaggaaagaacatgtgagcaaaaggccagcaaaaggccaggaaccgtaaaaaggccgcgttgctggcgtttttccataggctccgcccccctgacgagcatcacaaaaatcgacgctcaagtcagaggtggcgaaacccgacaggactataaagataccaggcgtttccccctggaagctccctcgtgcgctctcctgttccgaccctgccgcttaccggatacctgtccgcctttctcccttcgggaagcgtggcgctttctcatagctcacgctgtaggtatctcagttcggtgtaggtcgttcgctccaagctgggctgtgtgcacgaaccccccgttcagcccgaccgctgcgccttatccggtaactatcgtcttgagtccaacccggtaagacacgacttatcgccactggcagcagccactggtaacaggattagcagagcgaggtatgtaggcggtgctacagagttcttgaagtggtggcctaactacggctacactagaagaacagtatttggtatctgcgctctgctgaagccagttaccttcggaaaaagagttggtagctcttgatccggcaaacaaaccaccgctggtagcggtggtttttttgtttgcaagcagcagattacgcgcagaaaaaaaggatctcaagaagatcctttgatcttttctacggggtctgacgctcagtggaacgaaaactcacgttaagggattttggtcatgagattatcaaaaaggatcttcacctagatccttttaaattaaaaatgaagttttaaatcaatctaaagtatatatgagtaaacttggtctgacagttaccaatgcttaatcagtgaggcacctatctcagcgatctgtctatttcgttcatccatagttgcctgactccccgtcgtgtagataactacgatacgggagggcttaccatctggccccagtgctgcaatgataccgcgagacccacgctcaccggctccagatttatcagcaataaaccagccagccggaagggccgagcgcagaagtggtcctgcaactttatccgcctccatccagtctattaattgttgccgggaagctagagtaagtagttcgccagttaatagtttgcgcaacgttgttgccattgctacaggcatcgtggtgtcacgctcgtcgtttggtatggcttcattcagctccggttcccaacgatcaaggcgagttacatgatcccccatgttgtgcaaaaaagcggttagctccttcggtcctccgatcgttgtcagaagtaagttggccgcagtgttatcactcatggttatggcagcactgcataattctcttactgtcatgccatccgtaagatgcttttctgtgactggtgagtactcaaccaagtcattctgagaatagtgtatgcggcgaccgagttgctcttgcccggcgtcaatacgggataataccgcgccacatagcagaactttaaaagtgctcatcattggaaaacgttcttcggggcgaaaactctcaaggatcttaccgctgttgagatccagttcgatgtaacccactcgtgcacccaactgatcttcagcatcttttactttcaccagcgtttctgggtgagcaaaaacaggaaggcaaaatgccgcaaaaaagggaataagggcgacacggaaatgttgaatactcatactcttcctttttcaatattattgaagcatttatcagggttattgtctcatgagcggatacatatttgaatgtatttagaaaaataaacaaataggggttccgcgcacatttccccgaaaagtgccacctgacgtcgacggatcgggagatcaacttgtttattgcagcttataatggttacaaataaagcaatagcatcacaaatttcacaaataaagcatttttttcactgcattctagttgtggtttgtccaaactcatcaatgtatcttatcatgtctggatcaactggataactcaagctaaccaaaatcatcccaaacttcccaccccataccctattaccactgccaattacctgtggtttcatttactctaaacctgtgattcctctgaattattttcattttaaagaaattgtatttgttaaatatgtactacaaacttagtagt

SEQ ID NO: 547 - DNA, 10931 bp, Artificial Sequence
  pcDNA3.1 NEGFP STOP Atxn2 3UTR plasmid
  misc_feature (235)..(614): CMV early enhancer
  misc_feature (615)..(818): CMV immediate early promoter
  misc_feature (863)..(881): T7 promoter
  misc_feature (923)..(1636): enhanced GFP, mammalian codon-optimized
  misc_feature (1646)..(5584): human ATXN2 [NM_002973.3]
  misc_feature (5585)..(6464): 3' UTR of Atxn2 with additional downstream sequence including GU rich DSE
  misc_feature (6528)..(6752): bovine growth hormone poly(A) signal
  misc_feature (6798)..(7226): f1 bacteriophage origin of replication
  misc_feature (7240)..(7569): SV40 enhancer and early promoter
  misc_feature (7420)..(7555): SV40 origin of replication
  misc_feature (7636)..(8430): aminoglycoside phosphotransferase from Tn5
  misc_feature (8604)..(8725): SV40 poly(A) signal
  misc_feature (8774)..(8790): M13 rev primer (complement)
  misc_feature (8798)..(8814): lac operator
  misc_feature (8822)..(8852): lac promoter (complement)
  misc_feature (8867)..(8888): CAP binding site
  misc_feature (9176)..(9764): high-copy-number ColE1/pMB1/pBR322/pUC origin of Replication (complement)
  misc_feature (9935)..(10795): beta-lactamase (complement)
  misc_feature (10796)..(10900): AmpR promoter (complement)
gacggatcgggagatctcccgatcccctatggtgcactctcagtacaatctgctctgatgccgcatagttaagccagtatctgctccctgcttgtgtgttggaggtcgctgagtagtgcgcgagcaaaatttaagctacaacaaggcaaggcttgaccgacaattgcatgaagaatctgcttagggttaggcgttttgcgctgcttcgcgatgtacgggccagatatacgcgttgacattgattattgactagttattaatagtaatcaattacggggtcattagttcatagcccatatatggagttccgcgttacataacttacggtaaatggcccgcctggctgaccgcccaacgacccccgcccattgacgtcaataatgacgtatgttcccatagtaacgccaatagggactttccattgacgtcaatgggtggagtatttacggtaaactgcccacttggcagtacatcaagtgtatcatatgccaagtacgccccctattgacgtcaatgacggtaaatggcccgcctggcattatgcccagtacatgaccttatgggactttcctacttggcagtacatctacgtattagtcatcgctattaccatggtgatgcggttttggcagtacatcaatgggcgtggatagcggtttgactcacggggatttccaagtctccaccccattgacgtcaatgggagtttgttttggcaccaaaatcaacgggactttccaaaatgtcgtaacaactccgccccattgacgcaaatgggcggtaggcgtgtacggtgggaggtctatataagcagagctctctggctaactagagaacccactgcttactggcttatcgaaattaatacgactcactatagggagacccaagctggctagcgtttaaacttaagcttgccaccatgagcaagggcgaggagctgttcaccggggtggtgcccatcctggtcgagctggacggcgacgtaaacggccacaagttcagcgtgtccggcgagggcgagggcgatgccacctacggcaagctgaccctgaagttcatctgcaccaccggcaagctgcccgtgccctggcccaccctcgtgaccaccctgacctacggcgtgcagtgcttcagccgctaccccgaccacatgaagcagcacgacttcttcaagtccgccatgcccgaaggctacgtccaggagcgcaccatcttcttcaaggacgacggcaactacaagacccgcgccgaggtgaagttcgagggcgacaccctggtgaaccgcatcgagctgaagggcatcgacttcaaggaggacggcaacatcctggggcacaagctggagtacaactacaacagccacaacgtctatatcatggccgacaagcagaagaacggcatcaaggtgaacttcaagatccgccacaacatcgaggacggcagcgtgcagctcgccgaccactaccagcagaacacccccatcggcgacggccccgtgctgctgcccgacaaccactacctgagcacccagtccgccctgagcaaagaccccaacgagaagcgcgatcacatggtcctgctggagttcgtgaccgccgccgggatcactcacggcatggacgagctgtacaagggtacctgacgctcagcggccgcagctcctcggagtcccgcggtggccaccgagtctcgccgcttcgccgcagccaggtggcccgggtggcgctcgctccagcggccggcgcggcggagcgggcggggcggcggtggcgcggccccgggaccgtatccctccgccgcccctcccccgcccggccccggcccccctccctcccggcagagctcgcctccctccgcctcagactgttttggtagcaacggcaacggcggcggcgcgtttcggcccggctcccggcggctccttggtctcggcgggcctccccgccccttcgtcgtcctccttctccccctcgccagcccgggcgcccctccggccgcgccaacccgcgcctccccgctcggcgcccgcgcgtccccgccgcgttccggcgtctccttggcgcgcccggctcccggctgtccccgcccggcgtgcgagccggtgtatgggcccctcaccatgtcgctgaagccccagcagcagcagcagcagcagcagcagcagcagcagcagcaacagcagcagcagcagcagcagcagcagccgccgcccgcggctgccaatgtccgcaagcccggcggcagcggccttctagcgtcgcccgccgccgcgccttcgccgtcctcgtcctcggtctcctcgtcctcggccacggctccctcctcggtggtcgcggcgacctccggcggcgggaggcccggcctgggcagaggtcgaaacagtaacaaaggactgcctcagtctacgatttcttttgatggaatctatgcaaatatgaggatggttcatatacttacatcagttgttggctccaaatgtgaagtacaagtgaaaaatggaggtatatatgaaggagtttttaaaacttacagtccgaagtgtgatttggtacttgatgccgcacatgagaaaagtacagaatccagttcggggccgaaacgtgaagaaataatggagagtattttgttcaaatgttcagactttgttgtggtacagtttaaagatatggactccagttatgcaaaaagagatgcttttactgactctgctatcagtgctaaagtgaatggcgaacacaaagagaaggacctggagccctgggatgcaggtgaactcacagccaatgaggaacttgaggctttggaaaatgacgtatctaatggatgggatcccaatgatatgtttcgatataatgaagaaaattatggtgtagtgtctacgtatgatagcagtttatcttcgtatacagtgcccttagaaagagataactcagaagaatttttaaaacgggaagcaagggcaaaccagttagcagaagaaattgagtcaagtgcccagtacaaagctcgagtggccctggaaaatgatgataggagtgaggaagaaaaatacacagcagttcagagaaattccagtgaacgtgaggggcacagcataaacactagggaaaataaatatattcctcctggacaaagaaatagagaagtcatatcctggggaagtgggagacagaattcaccgcgtatgggccagcctggatcgggctccatgccatcaagatccacttctcacacttcagatttcaacccgaattctggttcagaccaaagagtagttaatggaggtgttccctggccatcgccttgcccatctccttcctctcgcccaccttctcgctaccagtcaggtcccaactctcttccacctcgggcagccacccctacacggccgccctccaggcccccctcgcggccatccagacccccgtctcacccctctgctcatggttctccagctcctgtctctactatgcctaaacgcatgtcttcagaagggcctccaaggatgtccccaaaggcccagcgacatcctcgaaatcacagagtttctgctgggaggggttccatatccagtggcctagaatttgtatcccacaacccacccagtgaagcagctactcctccagtagcaaggaccagtccctcggggggaacgtggtcatcagtggtcagtggggttccaagattatcccctaaaactcatagacccaggtctcccagacagaacagtattggaaatacccccagtgggccagttcttgcttctccccaagctggtattattccaactgaagctgttgccatgcctattccagctgcatctcctacgcctgctagtcctgcatcgaacagagctgttaccccttctagtgaggctaaagattccaggcttcaagatcagaggcagaactctcctgcagggaataaagaaaatattaaacccaatgaaacatcacctagcttctcaaaagctgaaaacaaaggtatatcaccagttgtttctgaacatagaaaacagattgatgatttaaagaaatttaagaatgattttaggttacagccaagttctacttctgaatctatggatcaactactaaacaaaaatagagagggagaaaaatcaagagatttgatcaaagacaaaattgaaccaagtgctaaggattctttcattgaaaatagcagcagcaactgtaccagtggcagcagcaagccgaatagccccagcatttccccttcaatacttagtaacacggagcacaagaggggacctgaggtcacttcccaaggggttcagacttccagcccagcatgtaaacaagagaaagacgataaggaagagaagaaagacgcagctgagcaagttaggaaatcaacattgaatcccaatgcaaaggagttcaacccacgttccttctctcagccaaagccttctactaccccaacttcacctcggcctcaagcacaacctagcccatctatggtgggtcatcaacagccaactccagtttatactcagcctgtttgttttgcaccaaatatgatgtatccagtcccagtgagcccaggcgtgcaacctttatacccaatacctatgacgcccatgccagtgaatcaagccaagacatatagagcagtaccaaatatgccccaacagcggcaagaccagcatcatcagagtgccatgatgcacccagcgtcagcagcgggcccaccgattgcagccaccccaccagcttactccacgcaatatgttgcctacagtcctcagcagttcccaaatcagccccttgttcagcatgtgccacattatcagtctcagcatcctcatgtctatagtcctgtaatacagggtaatgctagaatgatggcaccaccaacacacgcccagcctggtttagtatcttcttcagcaactcagtacggggctcatgagcagacgcatgcgatgtatgcatgtcccaaattaccatacaacaaggagacaagcccttctttctactttgccatttccacgggctcccttgctcagcagtatgcgcaccctaacgctaccctgcacccacatactccacaccctcagccttcagctacccccactggacagcagcaaagccaacatggtggaagtcatcctgcacccagtcctgttcagcaccatcagcaccaggccgcccaggctctccatctggccagtccacagcagcagtcagccatttaccacgcggggcttgcgccaactccaccctccatgacacctgcctccaacacgcagtcgccacagaatagtttcccagcagcacaacagactgtctttacgatccatccttctcacgttcagccggcgtataccaacccaccccacatggcccacgtacctcaggctcatgtacagtcaggaatggttccttctcatccaactgcccatgcgccaatgatgctaatgacgacacagccacccggcggtccccaggccgccctcgctcaaagtgcactacagcccattccagtctcgacaacagcgcatttcccctatatgacgcacccttcagtacaagcccaccaccaacagcagttgtaaggctgccctggaggaaccgaaaggccaaattccctcctcccttctactgcttctaccaactggaagcacagaaaactagaatttcatttattttgtttttaaaatatatatgttgatttcttgtaacatccaataggaatgctaacagttcacttgcagtggaagatacttggaccgagtagaggcatttaggaacttgggggctattccataattccatatgctgtttcagagtcccgcaggtaccccagctctgcttgccgaaactggaagttatttattttttaataacccttgaaagtcatgaacacatcagctagcaaaagaagtaacaagagtgattcttgctgctattactgctaaaaaaaaaaaaaaaaaaaaatcaagacttggaacgcccttttactaaacttgacaaagtttcagtaaattcttaccgtcaaactgacggattattatttataaatcaagtttgatgaggtgatcactgtctacagtggttcaacttttaagttaagggaaaaacttttactttgtagataatataaaataaaaacttaaaaaaaatttaaaaaataaaaaaagttttaaaaactgatcaagttagtgtgtgtctgtataagctacttctttgtaggatacttaatatcaaagcaggtgtgctaagggtgcattttgaatatcccggaaggtagctgtgaaatgatttttcttcttcacccttagttctggttcaaggtatctctagaaaaagacaagactgagctattctctttggtggattagagatctgcttcaggaggaggaaggttggccagagttgggcagcactgaaattccacatcctcgggctgacaccgattctgtaagcttcctttttatccagcacagtggcggccgctcgagtctagagggcccgtttaaacccgctgatcagcctcgactgtgccttctagttgccagccatctgttgtttgcccctcccccgtgccttccttgaccctggaaggtgccactcccactgtcctttcctaataaaatgaggaaattgcatcgcattgtctgagtaggtgtcattctattctggggggtggggtggggcaggacagcaagggggaggattgggaagacaatagcaggcatgctggggatgcggtgggctctatggcttctgaggcggaaagaaccagctggggctctagggggtatccccacgcgccctgtagcggcgcattaagcgcggcgggtgtggtggttacgcgcagcgtgaccgctacacttgccagcgccctagcgcccgctcctttcgctttcttcccttcctttctcgccacgttcgccggctttccccgtcaagctctaaatcgggggctccctttagggttccgatttagtgctttacggcacctcgaccccaaaaaacttgattagggtgatggttcacgtagtgggccatcgccctgatagacggtttttcgccctttgacgttggagtccacgttctttaatagtggactcttgttccaaactggaacaacactcaaccctatctcggtctattcttttgatttataagggattttgccgatttcggcctattggttaaaaaatgagctgatttaacaaaaatttaacgcgaattaattctgtggaatgtgtgtcagttagggtgtggaaagtccccaggctccccagcaggcagaagtatgcaaagcatgcatctcaattagtcagcaaccaggtgtggaaagtccccaggctccccagcaggcagaagtatgcaaagcatgcatctcaattagtcagcaaccatagtcccgcccctaactccgcccatcccgcccctaactccgcccagttccgcccattctccgccccatggctgactaattttttttatttatgcagaggccgaggccgcctctgcctctgagctattccagaagtagtgaggaggcttttttggaggcctaggcttttgcaaaaagctcccgggagcttgtatatccattttcggatctgatcaagagacaggatgaggatcgtttcgcatgattgaacaagatggattgcacgcaggttctccggccgcttgggtggagaggctattcggctatgactgggcacaacagacaatcggctgctctgatgccgccgtgttccggctgtcagcgcaggggcgcccggttctttttgtcaagaccgacctgtccggtgccctgaatgaactgcaggacgaggcagcgcggctatcgtggctggccacgacgggcgttccttgcgcagctgtgctcgacgttgtcactgaagcgggaagggactggctgctattgggcgaagtgccggggcaggatctcctgtcatctcaccttgctcctgccgagaaagtatccatcatggctgatgcaatgcggcggctgcatacgcttgatccggctacctgcccattcgaccaccaagcgaaacatcgcatcgagcgagcacgtactcggatggaagccggtcttgtcgatcaggatgatctggacgaagagcatcaggggctcgcgccagccgaactgttcgccaggctcaaggcgcgcatgcccgacggcgaggatctcgtcgtgacccatggcgatgcctgcttgccgaatatcatggtggaaaatggccgcttttctggattcatcgactgtggccggctgggtgtggcggaccgctatcaggacatagcgttggctacccgtgatattgctgaagagcttggcggcgaatgggctgaccgcttcctcgtgctttacggtatcgccgctcccgattcgcagcgcatcgccttctatcgccttcttgacgagttcttctgagcgggactctggggttcgaaatgaccgaccaagcgacgcccaacctgccatcacgagatttcgattccaccgccgccttctatgaaaggttgggcttcggaatcgttttccgggacgccggctggatgatcctccagcgcggggatctcatgctggagttcttcgcccaccccaacttgtttattgcagcttataatggttacaaataaagcaatagcatcacaaatttcacaaataaagcatttttttcactgcattctagttgtggtttgtccaaactcatcaatgtatcttatcatgtctgtataccgtcgacctctagctagagcttggcgtaatcatggtcatagctgtttcctgtgtgaaattgttatccgctcacaattccacacaacatacgagccggaagcataaagtgtaaagcctggggtgcctaatgagtgagctaactcacattaattgcgttgcgctcactgcccgctttccagtcgggaaacctgtcgtgccagctgcattaatgaatcggccaacgcgcggggagaggcggtttgcgtattgggcgctcttccgcttcctcgctcactgactcgctgcgctcggtcgttcggctgcggcgagcggtatcagctcactcaaaggcggtaatacggttatccacagaatcaggggataacgcaggaaagaacatgtgagcaaaaggccagcaaaaggccaggaaccgtaaaaaggccgcgttgctggcgtttttccataggctccgcccccctgacgagcatcacaaaaatcgacgctcaagtcagaggtggcgaaacccgacaggactataaagataccaggcgtttccccctggaagctccctcgtgcgctctcctgttccgaccctgccgcttaccggatacctgtccgcctttctcccttcgggaagcgtggcgctttctcatagctcacgctgtaggtatctcagttcggtgtaggtcgttcgctccaagctgggctgtgtgcacgaaccccccgttcagcccgaccgctgcgccttatccggtaactatcgtcttgagtccaacccggtaagacacgacttatcgccactggcagcagccactggtaacaggattagcagagcgaggtatgtaggcggtgctacagagttcttgaagtggtggcctaactacggctacactagaagaacagtatttggtatctgcgctctgctgaagccagttaccttcggaaaaagagttggtagctcttgatccggcaaacaaaccaccgctggtagcggtggtttttttgtttgcaagcagcagattacgcgcagaaaaaaaggatctcaagaagatcctttgatcttttctacggggtctgacgctcagtggaacgaaaactcacgttaagggattttggtcatgagattatcaaaaaggatcttcacctagatccttttaaattaaaaatgaagttttaaatcaatctaaagtatatatgagtaaacttggtctgacagttaccaatgcttaatcagtgaggcacctatctcagcgatctgtctatttcgttcatccatagttgcctgactccccgtcgtgtagataactacgatacgggagggcttaccatctggccccagtgctgcaatgataccgcgagacccacgctcaccggctccagatttatcagcaataaaccagccagccggaagggccgagcgcagaagtggtcctgcaactttatccgcctccatccagtctattaattgttgccgggaagctagagtaagtagttcgccagttaatagtttgcgcaacgttgttgccattgctacaggcatcgtggtgtcacgctcgtcgtttggtatggcttcattcagctccggttcccaacgatcaaggcgagttacatgatcccccatgttgtgcaaaaaagcggttagctccttcggtcctccgatcgttgtcagaagtaagttggccgcagtgttatcactcatggttatggcagcactgcataattctcttactgtcatgccatccgtaagatgcttttctgtgactggtgagtactcaaccaagtcattctgagaatagtgtatgcggcgaccgagttgctcttgcccggcgtcaatacgggataataccgcgccacatagcagaactttaaaagtgctcatcattggaaaacgttcttcggggcgaaaactctcaaggatcttaccgctgttgagatccagttcgatgtaacccactcgtgcacccaactgatcttcagcatcttttactttcaccagcgtttctgggtgagcaaaaacaggaaggcaaaatgccgcaaaaaagggaataagggcgacacggaaatgttgaatactcatactcttcctttttcaatattattgaagcatttatcagggttattgtctcatgagcggatacatatttgaatgtatttagaaaaataaacaaataggggttccgcgcacatttccccgaaaagtgccacctgacgtc

SEQ ID NO: 548 - DNA, 138 bp, Artificial Sequence
  miRNA - XD-14857_miR-1-1_911 Control_amiRNA
catgcagactgcctgcttgggatggagttcaagggacgtcgccttatggacctgctaagctaaggaacgtcccttgaactccttctcaggccgggacctctctcgccgcactgaggggcactccacaccacgggggcc

SEQ ID NO: 549 - DNA, 136 bp, Artificial Sequence
  miRNA - XD-14857_miR-155E_911 Control_amiRNA
ctggaggcttgctttgggctgtatgctgaggaacgtcccttgaactccttttttggcctctgactgaaaggagttaaggacgttcctcaggacaaggccctttatcagcactcacatggaacaaatggccaccgtg

SEQ ID NO: 550 - DNA, 136 bp, Artificial Sequence
  miRNA - XD-14790_miR-155E_911 Control_amiRNA
ctggaggcttgctttgggctgtatgctgttcgggttcttatctgaagtgtttttggcctctgactgaacacttcaatagaacccgaacaggacaaggccctttatcagcactcacatggaacaaatggccaccgtg

SEQ ID NO: 551 - DNA, 138 bp, Artificial Sequence
  miRNA - XD-14790_miR-1-1_911 Control_amiRNA
catgcagactgcctgcttgggagacttcagataagaaccgagaatatggacctgctaagctattcgggttcttatctgaagtgtctcaggccgggacctctctcgccgcactgaggggcactccacaccacgggggcc

SEQ ID NO: 552 - DNA, 136 bp, Artificial Sequence
  miRNA - XD-14800_miR-155E_911 Control_amiRNA
ctggaggcttgctttgggctgtatgctgttgatttcctcgatgtcgctggttttggcctctgactgaccagcgactcgggaaatcaacaggacaaggccctttatcagcactcacatggaacaaatggccaccgtg

SEQ ID NO: 553 - DNA, 138 bp, Artificial Sequence
  miRNA - XD-14800_miR-1-1_911 Control_amiRNA
catgcagactgcctgcttgggcgagcgacatcgaggaaacgcaatatggacctgctaagctattgatttcctcgatgtcgctggctcaggccgggacctctctcgccgcactgaggggcactccacaccacgggggcc

SEQ ID NO: 554 - DNA, 138 bp, Artificial Sequence
  miRNA - XD-14743_miR-1-1_amiRNA
catgcagactgcctgcttgggagtgcctcagtctacgatcgtcttatggacctgctaagctaagaaatcgtagactgaggcagtctcaggccgggacctctctcgccgcactgaggggcactccacaccacgggggcc

SEQ ID NO: 555 - DNA, 136 bp, Artificial Sequence
  miRNA - XD-14743_miR-155E_amiRNA
ctggaggcttgctttgggctgtatgctgagaaatcgtagactgaggcagtttttggcctctgactgaactgcctcgtcacgatttctcaggacaaggccctttatcagcactcacatggaacaaatggccaccgtg

SEQ ID NO: 556 - DNA, 138 bp, Artificial Sequence
  miRNA - XD-14766_ miR-1-1_amiRNA
catgcagactgcctgcttggggcctttggaaaatgacgtcctcttatggacctgctaagctaagatacgtcattttccaaagccctcaggccgggacctctctcgccgcactgaggggcactccacaccacgggggcc

SEQ ID NO: 557 - DNA, 136 bp, Artificial Sequence
  miRNA - XD-14766_miR-155E_amiRNA
ctggaggcttgctttgggctgtatgctgagatacgtcattttccaaagccttttggcctctgactgaggctttggaaagacgtatctcaggacaaggccctttatcagcactcacatggaacaaatggccaccgtg

SEQ ID NO: 558 - DNA, 136 bp, Artificial Sequence
  miRNA - XD-14904_miR-155E_amiRNA
ctggaggcttgctttgggctgtatgctgagcgttagggtgcgcatactgcttttggcctctgactgagcagtatggcacctaacgctcaggacaaggccctttatcagcactcacatggaacaaatggccaccgtg

SEQ ID NO: 559 - DNA, 138 bp, Artificial Sequence
  miRNA - XD-14904_miR-1-1_amiRNA
catgcagactgcctgcttgggggagtatgcgcaccctaagagcttatggacctgctaagctaagcgttagggtgcgcatactgcctcaggccgggacctctctcgccgcactgaggggcactccacaccacgggggcc

SEQ ID NO: 560 - DNA, 136 bp, Artificial Sequence
  miRNA - XD-14857_miR-155E_amiRNA
ctggaggcttgctttgggctgtatgctgaggaacgtgggttgaactccttttttggcctctgactgaaaggagttaaccacgttcctcaggacaaggccctttatcagcactcacatggaacaaatggccaccgtg

SEQ ID NO: 561 - DNA, 138 bp, Artificial Sequence
  miRNA - XD-14857_miR-1-1_amiRNA
catgcagactgcctgcttgggatggagttcaacccacgtcgccttatggacctgctaagctaaggaacgtgggttgaactccttctcaggccgggacctctctcgccgcactgaggggcactccacaccacgggggcc

SEQ ID NO: 562 - DNA, 136 bp, Artificial Sequence
  miRNA - XD-14949_miR-155E_amiRNA
ctggaggcttgctttgggctgtatgctgataataatccgtcagtttgacgttttggcctctgactgacgtcaaacgacgattattatcaggacaaggccctttatcagcactcacatggaacaaatggccaccgtg

SEQ ID NO: 563 - DNA, 138 bp, Artificial Sequence
  miRNA - XD-14949_miR-1-1_amiRNA
catgcagactgcctgcttgggcctcaaactgacggattacgtattatggacctgctaagctaataataatccgtcagtttgacgctcaggccgggacctctctcgccgcactgaggggcactccacaccacgggggcc

SEQ ID NO: 564 - DNA, 136 bp, Artificial Sequence
  miRNA - XD-14787_miR-155E_amiRNA
ctggaggcttgctttgggctgtatgctgatacgcggtgaattctgtctccttttggcctctgactgaggagacagattaccgcgtatcaggacaaggccctttatcagcactcacatggaacaaatggccaccgtg

SEQ ID NO: 565 - DNA, 138 bp, Artificial Sequence
  miRNA - XD-14787_miR-1-1_amiRNA
catgcagactgcctgcttggggcagacagaattcaccgccttattatggacctgctaagctaatacgcggtgaattctgtctccctcaggccgggacctctctcgccgcactgaggggcactccacaccacgggggcc

SEQ ID NO: 566 - DNA, 136 bp, Artificial Sequence
  miRNA - XD-14792_miR-155E_amiRNA
ctggaggcttgctttgggctgtatgctgattaactactctttggtctgaattttggcctctgactgattcagaccaaggtagttaatcaggacaaggccctttatcagcactcacatggaacaaatggccaccgtg

SEQ ID NO: 567 - DNA, 136 bp, Artificial Sequence
  miRNA - XD-14889_miR-155E_amiRNA
ctggaggcttgctttgggctgtatgctgattgcgtggagtaagctggtggttttggcctctgactgaccaccagctacccacgcaatcaggacaaggccctttatcagcactcacatggaacaaatggccaccgtg

SEQ ID NO: 568 - DNA, 138 bp, Artificial Sequence
  miRNA - XD-14889_miR-1-1_amiRNA
catgcagactgcctgcttgggcgaccagcttactccacggaaattatggacctgctaagctaattgcgtggagtaagctggtggctcaggccgggacctctctcgccgcactgaggggcactccacaccacgggggcc

SEQ ID NO: 569 - DNA, 136 bp, Artificial Sequence
  miRNA - XD-14798_miR-155E_amiRNA
ctggaggcttgctttgggctgtatgctgatttcgaggatgtcgctgggccttttggcctctgactgaggcccagcacacctcgaaatcaggacaaggccctttatcagcactcacatggaacaaatggccaccgtg

SEQ ID NO: 570 - DNA, 138 bp, Artificial Sequence
  miRNA - XD-14798_miR-1-1_amiRNA
catgcagactgcctgcttggggccccagcgacatcctcgccaattatggacctgctaagctaatttcgaggatgtcgctgggccctcaggccgggacctctctcgccgcactgaggggcactccacaccacgggggcc

SEQ ID NO: 571 - DNA, 138 bp, Artificial Sequence
  miRNA - XD-14742_miR-1-1_amiRNA
catgcagactgcctgcttggggtctgcctcagtctacgacgttatatggacctgctaagctataaatcgtagactgaggcagtcctcaggccgggacctctctcgccgcactgaggggcactccacaccacgggggcc

SEQ ID NO: 572 - DNA, 136 bp, Artificial Sequence
  miRNA - XD-14742_miR-155E_amiRNA
ctggaggcttgctttgggctgtatgctgtaaatcgtagactgaggcagtcttttggcctctgactgagactgcctagttacgatttacaggacaaggccctttatcagcactcacatggaacaaatggccaccgtg

SEQ ID NO: 573 - DNA, 138 bp, Artificial Sequence
  miRNA - XD-14786_miR-1-1_amiRNA
catgcagactgcctgcttggggcgagacagaattcaccggagtatatggacctgctaagctatacgcggtgaattctgtctcccctcaggccgggacctctctcgccgcactgaggggcactccacaccacgggggcc

SEQ ID NO: 574 - DNA, 136 bp, Artificial Sequence
  miRNA - XD-14786_miR-155E_amiRNA
ctggaggcttgctttgggctgtatgctgtacgcggtgaattctgtctcccttttggcctctgactgagggagacaaatcaccgcgtacaggacaaggccctttatcagcactcacatggaacaaatggccaccgtg

SEQ ID NO: 575 - DNA, 138 bp, Artificial Sequence
  miRNA -  XD-14788_miR-1-1_amiRNA
catgcagactgcctgcttggggtgacagaattcaccgcgcgatatatggacctgctaagctatatacgcggtgaattctgtctcctcaggccgggacctctctcgccgcactgaggggcactccacaccacgggggcc

SEQ ID NO: 576 - DNA, 136 bp, Artificial Sequence
  miRNA -  XD-14788_miR-155E_amiRNA
ctggaggcttgctttgggctgtatgctgtatacgcggtgaattctgtctcttttggcctctgactgagagacagattcccgcgtatacaggacaaggccctttatcagcactcacatggaacaaatggccaccgtg

SEQ ID NO: 577 - DNA, 138 bp, Artificial Sequence
  miRNA -  XD-14890_miR-1-1_amiRNA
catgcagactgcctgcttgggctccagcttactccacgcccatatatggacctgctaagctatattgcgtggagtaagctggtgctcaggccgggacctctctcgccgcactgaggggcactccacaccacgggggcc

SEQ ID NO: 578 - DNA, 136 bp, Artificial Sequence
  miRNA - XD-14890_miR-155E_amiRNA
ctggaggcttgctttgggctgtatgctgtattgcgtggagtaagctggtgttttggcctctgactgacaccagctactcacgcaatacaggacaaggccctttatcagcactcacatggaacaaatggccaccgtg

SEQ ID NO: 579 - DNA, 136 bp, Artificial Sequence
  miRNA - XD-14799_miR-155E_amiRNA
ctggaggcttgctttgggctgtatgctgtatttcgaggatgtcgctgggcttttggcctctgactgagcccagcgcatctcgaaatacaggacaaggccctttatcagcactcacatggaacaaatggccaccgtg

SEQ ID NO: 580 - DNA, 138 bp, Artificial Sequence
  miRNA - XD-14799_miR-1-1_amiRNA
catgcagactgcctgcttgggggccagcgacatcctcgaccatatatggacctgctaagctatatttcgaggatgtcgctgggcctcaggccgggacctctctcgccgcactgaggggcactccacaccacgggggcc

SEQ ID NO: 581 - DNA, 138 bp, Artificial Sequence
  miRNA - XD-14887_miR-1-1_amiRNA
catgcagactgcctgcttgggagcaaatatgccccaacactcgatatggacctgctaagctatcgctgttggggcatatttggtctcaggccgggacctctctcgccgcactgaggggcactccacaccacgggggcc

SEQ ID NO: 582 - DNA, 136 bp, Artificial Sequence
  miRNA - XD-14887_miR-155E_amiRNA
ctggaggcttgctttgggctgtatgctgtcgctgttggggcatatttggtttttggcctctgactgaaccaaatagcccaacagcgacaggacaaggccctttatcagcactcacatggaacaaatggccaccgtg

SEQ ID NO: 583 - DNA, 138 bp, Artificial Sequence
  miRNA - XD-14901_miR-1-1_amiRNA
catgcagactgcctgcttgggcgcttgctcagcagtatggagcatatggacctgctaagctatgcgcatactgctgagcaagggctcaggccgggacctctctcgccgcactgaggggcactccacaccacgggggcc

SEQ ID NO: 584 - DNA, 136 bp, Artificial Sequence
  miRNA - XD-14901_miR-155E_amiRNA
ctggaggcttgctttgggctgtatgctgtgcgcatactgctgagcaagggttttggcctctgactgacccttgctagcgtatgcgcacaggacaaggccctttatcagcactcacatggaacaaatggccaccgtg

SEQ ID NO: 585 - DNA, 138 bp, Artificial Sequence
  miRNA - XD-14756_miR-1-1_amiRNA
catgcagactgcctgcttggggatcagactttgttgtggcgacatatggacctgctaagctatgtaccacaacaaagtctgaacctcaggccgggacctctctcgccgcactgaggggcactccacaccacgggggcc

SEQ ID NO: 586 - DNA, 136 bp, Artificial Sequence
  miRNA - XD-14756_miR-155E_amiRNA
ctggaggcttgctttgggctgtatgctgtgtaccacaacaaagtctgaacttttggcctctgactgagttcagacttgtgtggtacacaggacaaggccctttatcagcactcacatggaacaaatggccaccgtg

SEQ ID NO: 587 - DNA, 138 bp, Artificial Sequence
  miRNA - XD-14917_miR-1-1_amiRNA
catgcagactgcctgcttgggtgacgttcagccggcgtacgacatatggacctgctaagctatgtatacgccggctgaacgtgactcaggccgggacctctctcgccgcactgaggggcactccacaccacgggggcc

SEQ ID NO: 588 - DNA, 136 bp, Artificial Sequence
  miRNA - XD-14917_miR-155E_amiRNA
ctggaggcttgctttgggctgtatgctgtgtatacgccggctgaacgtgattttggcctctgactgatcacgttcgccgcgtatacacaggacaaggccctttatcagcactcacatggaacaaatggccaccgtg

SEQ ID NO: 589 - DNA, 136 bp, Artificial Sequence
  miRNA - XD-14846_miR-155E_amiRNA
ctggaggcttgctttgggctgtatgctgttactaagtattgaaggggaaattttggcctctgactgatttcccctcaaacttagtaacaggacaaggccctttatcagcactcacatggaacaaatggccaccgtg

SEQ ID NO: 590 - DNA, 138 bp, Artificial Sequence
  miRNA - XD-14846_miR-1-1_amiRNA
catgcagactgcctgcttgggtatccccttcaatacttacttaatatggacctgctaagctattactaagtattgaaggggaaactcaggccgggacctctctcgccgcactgaggggcactccacaccacgggggcc

SEQ ID NO: 591 - DNA, 138 bp, Artificial Sequence
  miRNA - XD-14835_miR-1-1_amiRNA
catgcagactgcctgcttgggtgtgaatctatggatcaagataatatggacctgctaagctattagttgatccatagattcagactcaggccgggacctctctcgccgcactgaggggcactccacaccacgggggcc

SEQ ID NO: 592 - DNA, 136 bp, Artificial Sequence
  miRNA - XD-14835_miR-155E_amiRNA
ctggaggcttgctttgggctgtatgctgttagttgatccatagattcagattttggcctctgactgatctgaatcatgatcaactaacaggacaaggccctttatcagcactcacatggaacaaatggccaccgtg

SEQ ID NO: 593 - DNA, 136 bp, Artificial Sequence
  miRNA - XD-14819_miR-155E_amiRNA
ctggaggcttgctttgggctgtatgctgttcgatgcaggactagcaggcgttttggcctctgactgacgcctgctgtctgcatcgaacaggacaaggccctttatcagcactcacatggaacaaatggccaccgtg

SEQ ID NO: 594 - DNA, 138 bp, Artificial Sequence
  miRNA - XD-14819_miR-1-1_amiRNA
catgcagactgcctgcttgggcccctgctagtcctgcatgagaatatggacctgctaagctattcgatgcaggactagcaggcgctcaggccgggacctctctcgccgcactgaggggcactccacaccacgggggcc

SEQ ID NO: 595 - DNA, 136 bp, Artificial Sequence
  miRNA - XD-14790_miR-155E_amiRNA
ctggaggcttgctttgggctgtatgctgttcgggttgaaatctgaagtgtttttggcctctgactgaacacttcaattcaacccgaacaggacaaggccctttatcagcactcacatggaacaaatggccaccgtg

SEQ ID NO: 596 - DNA, 138 bp, Artificial Sequence
  miRNA - XD-14790_miR-1-1_amiRNA
catgcagactgcctgcttgggagacttcagatttcaaccgagaatatggacctgctaagctattcgggttgaaatctgaagtgtctcaggccgggacctctctcgccgcactgaggggcactccacaccacgggggcc

SEQ ID NO: 597 - DNA, 138 bp, Artificial Sequence
  miRNA - XD-14800_miR-1-1_amiRNA
catgcagactgcctgcttgggcgagcgacatcctcgaaacgcaatatggacctgctaagctattgatttcgaggatgtcgctggctcaggccgggacctctctcgccgcactgaggggcactccacaccacgggggcc

SEQ ID NO: 598 - DNA, 136 bp, Artificial Sequence
  miRNA - XD-14800_miR-155E_amiRNA
ctggaggcttgctttgggctgtatgctgttgatttcgaggatgtcgctggttttggcctctgactgaccagcgactcccgaaatcaacaggacaaggccctttatcagcactcacatggaacaaatggccaccgtg

SEQ ID NO: 599 - DNA, 136 bp, Artificial Sequence
  miRNA - XD-14781_miR-155E_amiRNA
ctggaggcttgctttgggctgtatgctgttgtactgggcacttgactcaattttggcctctgactgattgagtcagtgccagtacaacaggacaaggccctttatcagcactcacatggaacaaatggccaccgtg

SEQ ID NO: 600 - DNA, 138 bp, Artificial Sequence
  miRNA - XD-14781_miR-1-1_amiRNA
catgcagactgcctgcttgggtagagtcaagtgcccagtcccaatatggacctgctaagctattgtactgggcacttgactcaactcaggccgggacctctctcgccgcactgaggggcactccacaccacgggggcc

SEQ ID NO: 601 - DNA, 22 bp, Artificial Sequence
  XD-14742 Guide (antisense) sequence
taaatcgtagactgaggcagtc

SEQ ID NO: 602 - DNA, 22 bp, Artificial Sequence
  XD-14743 Guide (antisense) sequence
agaaatcgtagactgaggcagt

SEQ ID NO: 603 - DNA, 22 bp, Artificial Sequence
  XD-14756 Guide (antisense) sequence
tgtaccacaacaaagtctgaac

SEQ ID NO: 604 - DNA, 22 bp, Artificial Sequence
  XD-14766 Guide (antisense) sequence
agatacgtcattttccaaagcc

SEQ ID NO: 605 - DNA, 22 bp, Artificial Sequence
  XD-14786 Guide (antisense) sequence
tacgcggtgaattctgtctccc

SEQ ID NO: 606 - DNA, 22 bp, Artificial Sequence
  XD-14788 Guide (antisense) sequence
tatacgcggtgaattctgtctc

SEQ ID NO: 607 - DNA, 22 bp, Artificial Sequence
  XD-14790 Guide (antisense) sequence
ttcgggttgaaatctgaagtgt

SEQ ID NO: 608 - DNA, 22 bp, Artificial Sequence
  XD-14792 Guide (antisense) sequence
attaactactctttggtctgaa

SEQ ID NO: 609 - DNA, 22 bp, Artificial Sequence
  XD-14798 Guide (antisense) sequence
atttcgaggatgtcgctgggcc

SEQ ID NO: 610 - DNA, 22 bp, Artificial Sequence
  XD-14799 Guide (antisense) sequence
tatttcgaggatgtcgctgggc

SEQ ID NO: 611 - DNA, 22 bp, Artificial Sequence
  XD-14800 Guide (antisense) sequence
ttgatttcgaggatgtcgctgg

SEQ ID NO: 612 - DNA, 22 bp, Artificial Sequence
  XD-14819 Guide (antisense) sequence
ttcgatgcaggactagcaggcg

SEQ ID NO: 613 - DNA, 22 bp, Artificial Sequence
  XD-14835 Guide (antisense) sequence
ttagttgatccatagattcaga

SEQ ID NO: 614 - DNA, 22 bp, Artificial Sequence
  XD-14846 Guide (antisense) sequence
ttactaagtattgaaggggaaa

SEQ ID NO: 615 - DNA, 22 bp, Artificial Sequence
  XD-14857 Guide (antisense) sequence
aggaacgtgggttgaactcctt

SEQ ID NO: 616 - DNA, 22 bp, Artificial Sequence
  XD-14887 Guide (antisense) sequence
tcgctgttggggcatatttggt

SEQ ID NO: 617 - DNA, 22 bp, Artificial Sequence
  XD-14889 Guide (antisense) sequence
attgcgtggagtaagctggtgg

SEQ ID NO: 618 - DNA, 22 bp, Artificial Sequence
  XD-14890 Guide (antisense) sequence
tattgcgtggagtaagctggtg

SEQ ID NO: 619 - DNA, 22 bp, Artificial Sequence
  XD-14901 Guide (antisense) sequence
tgcgcatactgctgagcaaggg

SEQ ID NO: 620 - DNA, 22 bp, Artificial Sequence
  XD-14904 Guide (antisense) sequence
agcgttagggtgcgcatactgc

SEQ ID NO: 621 - DNA, 22 bp, Artificial Sequence
  XD-14917 Guide (antisense) sequence
tgtatacgccggctgaacgtga

SEQ ID NO: 622 - DNA, 5569 bp, Artificial Sequence
  scAAV.Syn.miR1-1.XD14792.GFP.SV40 plasmid
  misc_feature (1)..(589): ori
  misc_feature (1018)..(1123): Mut 5' ITR
  misc_feature (1128)..(1575): human synapsin I promoter
  misc_feature (1576)..(1593): Beta globin exon
  misc_feature (1594)..(2208): beta-globin intron (truncated)
  misc_feature (1701)..(1763): miR1-1 insert
  misc_feature (2209)..(2261): Beta globin sequence
  misc_feature (2263)..(2268): Kozak
  misc_feature (2269)..(2985): enhanced GFP, mammalian codon-optimized
  misc_feature (2986)..(3015): c-myc tag
  misc_feature (3055)..(3274): SV40 polyA
  misc_feature (3318)..(3447): 3' ITR
  misc_feature (3697)..(4152): F1 Ori
  misc_feature (4434)..(4538): AmpR Promoter
  misc_feature (4539)..(5399): AmpR
ttgagatcctttttttctgcgcgtaatctgctgcttgcaaacaaaaaaaccaccgctaccagcggtggtttgtttgccggatcaagagctaccaactctttttccgaaggtaactggcttcagcagagcgcagataccaaatactgttcttctagtgtagccgtagttaggccaccacttcaagaactctgtagcaccgcctacatacctcgctctgctaatcctgttaccagtggctgctgccagtggcgataagtcgtgtcttaccgggttggactcaagacgatagttaccggataaggcgcagcggtcgggctgaacggggggttcgtgcacacagcccagcttggagcgaacgacctacaccgaactgagatacctacagcgtgagctatgagaaagcgccacgcttcccgaagggagaaaggcggacaggtatccggtaagcggcagggtcggaacaggagagcgcacgagggagcttccagggggaaacgcctggtatctttatagtcctgtcgggtttcgccacctctgacttgagcgtcgatttttgtgatgctcgtcaggggggcggagcctatggaaaaacgccagcaacgcggcctttttacggttcctggccttttgctggccttttgctcacatgttctttcctgcgttatcccctgattctgtggataaccgtattaccgcctttgagtgagctgataccgctcgccgcagccgaacgaccgagcgcagcgagtcagtgagcgaggaagcggaagagcgcccaatacgcaaaccgcctctccccgcgcgttggccgattcattaatgcagctggcacgacaggtttcccgactggaaagcgggcagtgagcgcaacgcaattaatgtgagttagctcactcattaggcaccccaggctttacactttatgcttccggctcgtatgttgtgtggaattgtgagcggataacaatttcacacaggaaacagctatgaccatgattacgaattgcctgcaggcagctgcgcgctcgctcgctcactgaggccgcccgggcaaagcccgggcgtcgggcgacctttggtcgcccggcctcagtgagcgagcgagcgcgcagagagggagtggctcgagtgcaagtgggttttaggaccaggatgaggcggggtgggggtgcctacctgacgaccgaccccgacccactggacaagcacccaacccccattccccaaattgcgcatcccctatcagagagggggaggggaaacaggatgcggcgaggcgcgtgcgcactgccagcttcagcaccgcggacagtgccttcgcccccgcctggcggcgcgcgccaccgccgcctcagcactgaaggcgcgctgacgtcactcgccggtcccccgcaaactccccttcccggccaccttggtcgcgtccgcgccgccgccggcccagccggaccgcaccacgcgaggcgcgagataggggggcacgggcgcgaccatctgcgctgcggcgccggcgactcagcgctgcctcagtctgcggtgggcagcggaggagtcgtgtcgtgcctgagagcgcaggatcctgagaacttcagggtgagtctatgggacccttgatgttttctttccccttcttttctatggttaagttcatgtcataggaaggggaaaagtaacagggtcatgcagactgcctgcttgggtacagaccaaagagtagtcgaattatggacctgctaagctaattaactactctttggtctgaactcaggccgggacctctctcgccgcactgaggggcactccacaccacgggggccgacacatattgaccaaatcagggtaattttgcatttgtaattttaaaaaatgctttcttcttttaatatacttttttgtttatcttatttctaatactttccctaatctctttctttcagggcaataatgatacaatgtatcatgcctctttgcaccattctaaagaataacagtgataatttctgggttaaggcaatagcaatatttctgcatataaatatttctgcatataaattgtaactgatgtaagaggtttcatattgctaatagcagctacaatccagctaccattctgcttttattttatggttgggataaggctggattattctgagtccaagctaggcccttttgctaatcatgttcatacctcttatcttcctcccacagctcctgggcaacgtgctggtctgtgtgctggcccatcactttggcaaagaattcacgacaatggtgagcaagggcgaggagctgttcaccggggtggtgcccatcctggtcgagctggacggcgacgtaaacggccacaagttcagcgtgtccggcgagggcgagggcgatgccacctacggcaagctgaccctgaagttcatctgcaccaccggcaagctgcccgtgccctggcccaccctcgtgaccaccctgacctacggcgtgcagtgcttcagccgctaccccgaccacatgaagcagcacgacttcttcaagtccgccatgcccgaaggctacgtccaggagcgcaccatcttcttcaaggacgacggcaactacaagacccgcgccgaggtgaagttcgagggcgacaccctggtgaaccgcatcgagctgaagggcatcgacttcaaggaggacggcaacatcctggggcacaagctggagtacaactacaacagccacaacgtctatatcatggccgacaagcagaagaacggcatcaaggtgaacttcaagatccgccacaacatcgaggacggcagcgtgcagctcgccgaccactaccagcagaacacccccatcggcgacggccccgtgctgctgcccgacaaccactacctgagcacccagtccgccctgagcaaagaccccaacgagaagcgcgatcacatggtcctgctggagttcgtgaccgccgccgggatcactctcggcatggacgagctgtacaaggagcagaagctgatcagcgaggaggacctgtagcctgcaggggccctcgacccgggcggccgcttcgagcagacatgataagatacattgatgagtttggacaaaccacaactagaatgcagtgaaaaaaatgctttatttgtgaaatttgtgatgctattgctttatttgtaaccattataagctgcaataaacaagttaacaacaacaattgcattcattttatgtttcaggttcagggggagatgtgggaggttttttaaagcaagtaaaacctctacaaatgtggtaaccggtagataagtagcatggcgggttaatcattaactacaaggaacccctagtgatggagttggccactccctctctgcgcgctcgctcgctcactgaggccgggcgaccaaaggtcgcccgacgcccgggctttgcccgggcggcctcagtgagcgagcgagcgcgcagctgcctgcaggcagcttggcactggccgtcgttttacaacgtcgtgactgggaaaaccctggcgttacccaacttaatcgccttgcagcacatccccctttcgccagctggcgtaatagcgaagaggcccgcaccgatcgcccttcccaacagttgcgcagcctgaatggcgaatggcgcctgatgcggtattttctccttacgcatctgtgcggtatttcacaccgcatacgtcaaagcaaccatagtacgcgccctgtagcggcgcattaagcgcggcgggtgtggtggttacgcgcagcgtgaccgctacacttgccagcgccctagcgcccgctcctttcgctttcttcccttcctttctcgccacgttcgccggctttccccgtcaagctctaaatcgggggctccctttagggttccgatttagtgctttacggcacctcgaccccaaaaaacttgatttgggtgatggttcacgtagtgggccatcgccctgatagacggtttttcgccctttgacgttggagtccacgttctttaatagtggactcttgttccaaactggaacaacactcaaccctatctcgggctattcttttgatttataagggattttgccgatttcggcctattggttaaaaaatgagctgatttaacaaaaatttaacgcgaattttaacaaaatattaacgtttacaattttatggtgcactctcagtacaatctgctctgatgccgcatagttaagccagccccgacacccgccaacacccgctgacgcgccctgacgggcttgtctgctcccggcatccgcttacagacaagctgtgaccgtctccgggagctgcatgtgtcagaggttttcaccgtcatcaccgaaacgcgcgagacgaaagggcctcgtgatacgcctatttttataggttaatgtcatgataataatggtttcttagacgtcaggtggcacttttcggggaaatgtgcgcggatcccctatttgtttatttttctaaatacattcaaatatgtatccgctcatgagacaataaccctgataaatgcttcaataatattgaaaaaggaagagtatgagtattcaacatttccgtgtcgcccttattcccttttttgcggcattttgccttcctgtttttgctcacccagaaacgctggtgaaagtaaaagatgctgaagatcagttgggtgcacgagtgggttacatcgaactggatctcaacagcggtaagatccttgagagttttcgccccgaagaacgttttccaatgatgagcacttttaaagttctgctatgtggcgcggtattatcccgtattgacgccgggcaagagcaactcggtcgccgcatacactattctcagaatgacttggttgagtactcaccagtcacagaaaagcatcttacggatggcatgacagtaagagaattatgcagtgctgccataaccatgagtgataacactgcggccaacttacttctgacaacgatcggaggaccgaaggagctaaccgcttttttgcacaacatgggggatcatgtaactcgccttgatcgttgggaaccggagctgaatgaagccataccaaacgacgagcgtgacaccacgatgcctgtagcaatggcaacaacgttgcgcaaactattaactggcgaactacttactctagcttcccggcaacaattaatagactggatggaggcggataaagttgcaggaccacttctgcgctcggcccttccggctggctggtttattgctgataaatctggagccggtgagcgtgggtctcgcggtatcattgcagcactggggccagatggtaagccctcccgtatcgtagttatctacacgacggggagtcaggcaactatggatgaacgaaatagacagatcgctgagataggtgcctcactgattaagcattggtaactgtcagaccaagtttactcatatatactttagattgatttaaaacttcatttttaatttaaaaggatctaggtgaagatcctttttgataatctcatgaccaaaatcccttaacgtgagttttcgttccactgagcgtcagaccccgtagaaaagatcaaaggatcttc

SEQ ID NO: 623 - DNA, 5569 bp, Artificial Sequence
  scAAV.Syn.miR1-1.XD-14887.GFP.SV40 plasmid
  misc_feature (1)..(589): ori
  misc_feature (1018)..(1123): Mut 5' ITR
  misc_feature (1128)..(1575): human synapsin I promoter
  misc_feature (1576)..(1593): human beta globin exon
  misc_feature (1594)..(2208): human beta-globin intron (truncated)
  misc_feature (1702)..(1759): miR_1_1 insert
  misc_feature (2209)..(2261): Beta globin sequence
  misc_feature (2263)..(2268): Kozak
  misc_feature (2269)..(2985): enhanced GFP, mammalian codon-optimized
  misc_feature (2986)..(3015): c-myc tag
  misc_feature (3055)..(3274): SV40 polyA
  misc_feature (3174)..(3179): AATAAA
  misc_feature (3318)..(3447): 3' ITR
  misc_feature (3697)..(4152): F1 Ori
  misc_feature (4434)..(4538): AmpR Promoter
  misc_feature (4539)..(5399): AmpR
ttgagatcctttttttctgcgcgtaatctgctgcttgcaaacaaaaaaaccaccgctaccagcggtggtttgtttgccggatcaagagctaccaactctttttccgaaggtaactggcttcagcagagcgcagataccaaatactgttcttctagtgtagccgtagttaggccaccacttcaagaactctgtagcaccgcctacatacctcgctctgctaatcctgttaccagtggctgctgccagtggcgataagtcgtgtcttaccgggttggactcaagacgatagttaccggataaggcgcagcggtcgggctgaacggggggttcgtgcacacagcccagcttggagcgaacgacctacaccgaactgagatacctacagcgtgagctatgagaaagcgccacgcttcccgaagggagaaaggcggacaggtatccggtaagcggcagggtcggaacaggagagcgcacgagggagcttccagggggaaacgcctggtatctttatagtcctgtcgggtttcgccacctctgacttgagcgtcgatttttgtgatgctcgtcaggggggcggagcctatggaaaaacgccagcaacgcggcctttttacggttcctggccttttgctggccttttgctcacatgttctttcctgcgttatcccctgattctgtggataaccgtattaccgcctttgagtgagctgataccgctcgccgcagccgaacgaccgagcgcagcgagtcagtgagcgaggaagcggaagagcgcccaatacgcaaaccgcctctccccgcgcgttggccgattcattaatgcagctggcacgacaggtttcccgactggaaagcgggcagtgagcgcaacgcaattaatgtgagttagctcactcattaggcaccccaggctttacactttatgcttccggctcgtatgttgtgtggaattgtgagcggataacaatttcacacaggaaacagctatgaccatgattacgaattgcctgcaggcagctgcgcgctcgctcgctcactgaggccgcccgggcaaagcccgggcgtcgggcgacctttggtcgcccggcctcagtgagcgagcgagcgcgcagagagggagtggctcgagtgcaagtgggttttaggaccaggatgaggcggggtgggggtgcctacctgacgaccgaccccgacccactggacaagcacccaacccccattccccaaattgcgcatcccctatcagagagggggaggggaaacaggatgcggcgaggcgcgtgcgcactgccagcttcagcaccgcggacagtgccttcgcccccgcctggcggcgcgcgccaccgccgcctcagcactgaaggcgcgctgacgtcactcgccggtcccccgcaaactccccttcccggccaccttggtcgcgtccgcgccgccgccggcccagccggaccgcaccacgcgaggcgcgagataggggggcacgggcgcgaccatctgcgctgcggcgccggcgactcagcgctgcctcagtctgcggtgggcagcggaggagtcgtgtcgtgcctgagagcgcaggatcctgagaacttcagggtgagtctatgggacccttgatgttttctttccccttcttttctatggttaagttcatgtcataggaaggggaaaagtaacagggtcatgcagactgcctgcttgggagcaaatatgccccaacactcgatatggacctgctaagctatcgctgttggggcatatttggtctcaggccgggacctctctcgccgcactgaggggcactccacaccacgggggccgacacatattgaccaaatcagggtaattttgcatttgtaattttaaaaaatgctttcttcttttaatatacttttttgtttatcttatttctaatactttccctaatctctttctttcagggcaataatgatacaatgtatcatgcctctttgcaccattctaaagaataacagtgataatttctgggttaaggcaatagcaatatttctgcatataaatatttctgcatataaattgtaactgatgtaagaggtttcatattgctaatagcagctacaatccagctaccattctgcttttattttatggttgggataaggctggattattctgagtccaagctaggcccttttgctaatcatgttcatacctcttatcttcctcccacagctcctgggcaacgtgctggtctgtgtgctggcccatcactttggcaaagaattcacgacaatggtgagcaagggcgaggagctgttcaccggggtggtgcccatcctggtcgagctggacggcgacgtaaacggccacaagttcagcgtgtccggcgagggcgagggcgatgccacctacggcaagctgaccctgaagttcatctgcaccaccggcaagctgcccgtgccctggcccaccctcgtgaccaccctgacctacggcgtgcagtgcttcagccgctaccccgaccacatgaagcagcacgacttcttcaagtccgccatgcccgaaggctacgtccaggagcgcaccatcttcttcaaggacgacggcaactacaagacccgcgccgaggtgaagttcgagggcgacaccctggtgaaccgcatcgagctgaagggcatcgacttcaaggaggacggcaacatcctggggcacaagctggagtacaactacaacagccacaacgtctatatcatggccgacaagcagaagaacggcatcaaggtgaacttcaagatccgccacaacatcgaggacggcagcgtgcagctcgccgaccactaccagcagaacacccccatcggcgacggccccgtgctgctgcccgacaaccactacctgagcacccagtccgccctgagcaaagaccccaacgagaagcgcgatcacatggtcctgctggagttcgtgaccgccgccgggatcactctcggcatggacgagctgtacaaggagcagaagctgatcagcgaggaggacctgtagcctgcaggggccctcgacccgggcggccgcttcgagcagacatgataagatacattgatgagtttggacaaaccacaactagaatgcagtgaaaaaaatgctttatttgtgaaatttgtgatgctattgctttatttgtaaccattataagctgcaataaacaagttaacaacaacaattgcattcattttatgtttcaggttcagggggagatgtgggaggttttttaaagcaagtaaaacctctacaaatgtggtaaccggtagataagtagcatggcgggttaatcattaactacaaggaacccctagtgatggagttggccactccctctctgcgcgctcgctcgctcactgaggccgggcgaccaaaggtcgcccgacgcccgggctttgcccgggcggcctcagtgagcgagcgagcgcgcagctgcctgcaggcagcttggcactggccgtcgttttacaacgtcgtgactgggaaaaccctggcgttacccaacttaatcgccttgcagcacatccccctttcgccagctggcgtaatagcgaagaggcccgcaccgatcgcccttcccaacagttgcgcagcctgaatggcgaatggcgcctgatgcggtattttctccttacgcatctgtgcggtatttcacaccgcatacgtcaaagcaaccatagtacgcgccctgtagcggcgcattaagcgcggcgggtgtggtggttacgcgcagcgtgaccgctacacttgccagcgccctagcgcccgctcctttcgctttcttcccttcctttctcgccacgttcgccggctttccccgtcaagctctaaatcgggggctccctttagggttccgatttagtgctttacggcacctcgaccccaaaaaacttgatttgggtgatggttcacgtagtgggccatcgccctgatagacggtttttcgccctttgacgttggagtccacgttctttaatagtggactcttgttccaaactggaacaacactcaaccctatctcgggctattcttttgatttataagggattttgccgatttcggcctattggttaaaaaatgagctgatttaacaaaaatttaacgcgaattttaacaaaatattaacgtttacaattttatggtgcactctcagtacaatctgctctgatgccgcatagttaagccagccccgacacccgccaacacccgctgacgcgccctgacgggcttgtctgctcccggcatccgcttacagacaagctgtgaccgtctccgggagctgcatgtgtcagaggttttcaccgtcatcaccgaaacgcgcgagacgaaagggcctcgtgatacgcctatttttataggttaatgtcatgataataatggtttcttagacgtcaggtggcacttttcggggaaatgtgcgcggaacccctatttgtttatttttctaaatacattcaaatatgtatccgctcatgagacaataaccctgataaatgcttcaataatattgaaaaaggaagagtatgagtattcaacatttccgtgtcgcccttattcccttttttgcggcattttgccttcctgtttttgctcacccagaaacgctggtgaaagtaaaagatgctgaagatcagttgggtgcacgagtgggttacatcgaactggatctcaacagcggtaagatccttgagagttttcgccccgaagaacgttttccaatgatgagcacttttaaagttctgctatgtggcgcggtattatcccgtattgacgccgggcaagagcaactcggtcgccgcatacactattctcagaatgacttggttgagtactcaccagtcacagaaaagcatcttacggatggcatgacagtaagagaattatgcagtgctgccataaccatgagtgataacactgcggccaacttacttctgacaacgatcggaggaccgaaggagctaaccgcttttttgcacaacatgggggatcatgtaactcgccttgatcgttgggaaccggagctgaatgaagccataccaaacgacgagcgtgacaccacgatgcctgtagcaatggcaacaacgttgcgcaaactattaactggcgaactacttactctagcttcccggcaacaattaatagactggatggaggcggataaagttgcaggaccacttctgcgctcggcccttccggctggctggtttattgctgataaatctggagccggtgagcgtgggtctcgcggtatcattgcagcactggggccagatggtaagccctcccgtatcgtagttatctacacgacggggagtcaggcaactatggatgaacgaaatagacagatcgctgagataggtgcctcactgattaagcattggtaactgtcagaccaagtttactcatatatactttagattgatttaaaacttcatttttaatttaaaaggatctaggtgaagatcctttttgataatctcatgaccaaaatcccttaacgtgagttttcgttccactgagcgtcagaccccgtagaaaagatcaaaggatcttc

SEQ ID NO: 624 - DNA, 6504 bp, Artificial Sequence
  ssAAV.CAG.miR1-1.XD-14792.GFP.SV40pA plasmid
  misc_feature (1)..(589): high-copy-number ColE1/pMB1/pBR322/pUC origin of replication
  misc_feature (877)..(898): CAP binding site
  misc_feature (913)..(943): lac promoter
  misc_feature (951)..(967): lac operator
  misc_feature (1018)..(1147): 5' ITR
  misc_feature (1190)..(1682): CMV enhancer
  misc_feature (1681)..(1982): Promoter
  misc_feature (1986)..(2079): Exon1
  misc_feature (2080)..(2957): Intron
  misc_feature (2962)..(3100): miR-1-1 XD-14792
  misc_feature (3143)..(3197): Beta globin exon
  misc_feature (3198)..(3203): Kozak
  misc_feature (3204)..(3920): enhanced GFP, mammalian codon-optimized
  misc_feature (3921)..(3950): c-myc tag
  misc_feature (3990)..(4211): SV40 polyA
  misc_feature (4253)..(4382): 3' ITR
  misc_feature (4632)..(5087): f1 bacteriophage origin of replication
  misc_feature (5369)..(5473): AmpR promoter
  misc_feature (5474)..(6334): beta-lactamase
ttgagatcctttttttctgcgcgtaatctgctgcttgcaaacaaaaaaaccaccgctaccagcggtggtttgtttgccggatcaagagctaccaactctttttccgaaggtaactggcttcagcagagcgcagataccaaatactgttcttctagtgtagccgtagttaggccaccacttcaagaactctgtagcaccgcctacatacctcgctctgctaatcctgttaccagtggctgctgccagtggcgataagtcgtgtcttaccgggttggactcaagacgatagttaccggataaggcgcagcggtcgggctgaacggggggttcgtgcacacagcccagcttggagcgaacgacctacaccgaactgagatacctacagcgtgagctatgagaaagcgccacgcttcccgaagggagaaaggcggacaggtatccggtaagcggcagggtcggaacaggagagcgcacgagggagcttccagggggaaacgcctggtatctttatagtcctgtcgggtttcgccacctctgacttgagcgtcgatttttgtgatgctcgtcaggggggcggagcctatggaaaaacgccagcaacgcggcctttttacggttcctggccttttgctggccttttgctcacatgttctttcctgcgttatcccctgattctgtggataaccgtattaccgcctttgagtgagctgataccgctcgccgcagccgaacgaccgagcgcagcgagtcagtgagcgaggaagcggaagagcgcccaatacgcaaaccgcctctccccgcgcgttggccgattcattaatgcagctggcacgacaggtttcccgactggaaagcgggcagtgagcgcaacgcaattaatgtgagttagctcactcattaggcaccccaggctttacactttatgcttccggctcgtatgttgtgtggaattgtgagcggataacaatttcacacaggaaacagctatgaccatgattacgaattgcctgcaggcagctgcgcgctcgctcgctcactgaggccgcccgggcaaagcccgggcgtcgggcgacctttggtcgcccggcctcagtgagcgagcgagcgcgcagagagggagtggccaactccatcactaggggttccttgtagttaatgattaacccgccatgctacttatctactcgagtcaatattggccattagccatattattcattggttatatagcataaatcaatattggctattggccattgcatacgttgtatctatatcataatatgtacatttatattggctcatgtccaatatgaccgccatgttggcattgattattgactagttattaatagtaatcaattacggggtcattagttcatagcccatatatggagttccgcgttacataacttacggtaaatggcccgcctggctgaccgcccaacgacccccgcccattgacgtcaataatgacgtatgttcccatagtaacgccaatagggactttccattgacgtcaatgggtggagtatttacggtaaactgcccacttggcagtacatcaagtgtatcatatgccaagtccgccccctattgacgtcaatgacggtaaatggcccgcctggcattatgcccagtacatgaccttacgggactttcctacttggcagtacatctacgtattagtcatcgctattaccatggtcgaggtgagccccacgttctgcttcactctccccatctcccccccctccccacccccaattttgtatttatttattttttaattattttgtgcagcgatgggggcggggggggggggggggcgcgcgccaggcggggcggggcggggcgaggggcggggcggggcgaggcggagaggtgcggcggcagccaatcagagcggcgcgctccgaaagtttccttttatggcgaggcggcggcggcggcggccctataaaaagcgaagcgcgcggcgggcgggagtcgctgcgacgctgccttcgccccgtgccccgctccgccgccgcctcgcgccgcccgccccggctctgactgaccgcgttactcccacaggtgagcgggcgggacggcccttctcctccgggctgtaattagcgcttggtttaatgacggcttgtttcttttctgtggctgcgtgaaagccttgaggggctccgggagggccctttgtgcgggggggagcggctcggggggtgcgtgcgtgtgtgtgtgcgtggggagcgccgcgtgcggcccgcgctgcccggcggctgtgagcgctgcgggcgcggcgcggggctttgtgcgctccgcagtgtgcgcgaggggagcgcggccgggggcggtgccccgcggtgcggggggggctgcgaggggaacaaaggctgcgtgcggggtgtgtgcgtgggggggtgagcagggggtgtgggcgcggcggtcgggctgtaacccccccctgcacccccctccccgagttgctgagcacggcccggcttcgggtgcggggctccgtacggggcgtggcgcggggctcgccgtgccgggcggggggtggcggcaggtgggggtgccgggcggggcggggccgcctcgggccggggagggctcgggggaggggcgcggcggcccccggagcgccggcggctgtcgaggcgcggcgagccgcagccattgccttttatggtaatcgtgcgagagggcgcagggacttcctttgtcccaaatctgtgcggagccgaaatctgggaggcgccgccgcaccccctctagcgggcgcggggcgaagcggtgcggcgccggcaggaaggaaatgggcggggagggccttcgtgcgtcgccgcgccgccgtccccttctccctctccagcctcggggctgtccgcggggggacggctgccttcgggggggacggggcagggcggggttcggcttctggcgtgtgaccggcggctctagcatgcagactgcctgcttgggtacagaccaaagagtagtcgaattatggacctgctaagctaattaactactctttggtctgaactcaggccgggacctctctcgccgcactgaggggcactccacaccacgggggccgagcctctgctaaccatgttcatgccttcttctttttcctacagctcctgggcaacgtgctggttattgtgctgtctcatcattttggcaaagaattcacgacaatggtgagcaagggcgaggagctgttcaccggggtggtgcccatcctggtcgagctggacggcgacgtaaacggccacaagttcagcgtgtccggcgagggcgagggcgatgccacctacggcaagctgaccctgaagttcatctgcaccaccggcaagctgcccgtgccctggcccaccctcgtgaccaccctgacctacggcgtgcagtgcttcagccgctaccccgaccacatgaagcagcacgacttcttcaagtccgccatgcccgaaggctacgtccaggagcgcaccatcttcttcaaggacgacggcaactacaagacccgcgccgaggtgaagttcgagggcgacaccctggtgaaccgcatcgagctgaagggcatcgacttcaaggaggacggcaacatcctggggcacaagctggagtacaactacaacagccacaacgtctatatcatggccgacaagcagaagaacggcatcaaggtgaacttcaagatccgccacaacatcgaggacggcagcgttcagctcgccgaccactaccagcagaacacccccatcggcgacggccccgtgctgctgcccgacaaccactacctgagcacccagtccgccctgagcaaagaccccaacgagaagcgcgatcacatggtcctgctggagttcgtgaccgccgccgggatcactctcggcatggacgagctgtacaaggagcagaagctgatcagcgaggaggacctgtagcctgcaggggccctcgacccgggcggccgcttcgagcagacatgataagatacattgatgagtttggacaaaccacaactagaatgcagtgaaaaaaatgctttatttgtgaaatttgtgatgctattgctttatttgtaaccattataagctgcaataaacaagttaacaacaacaattgcattcattttatgtttcaggttcagggggagatgtgggaggttttttaaagcaagtaaaacctctacaaatgtggtaaccggtagataagtagcatggcgggttaatcattaactacaaggaacccctagtgatggagttggccactccctctctgcgcgctcgctcgctcactgaggccgggcgaccaaaggtcgcccgacgcccgggctttgcccgggcggcctcagtgagcgagcgagcgcgcagctgcctgcaggcagcttggcactggccgtcgttttacaacgtcgtgactgggaaaaccctggcgttacccaacttaatcgccttgcagcacatccccctttcgccagctggcgtaatagcgaagaggcccgcaccgatcgcccttcccaacagttgcgcagcctgaatggcgaatggcgcctgatgcggtattttctccttacgcatctgtgcggtatttcacaccgcatacgtcaaagcaaccatagtacgcgccctgtagcggcgcattaagcgcggcgggtgtggtggttacgcgcagcgtgaccgctacacttgccagcgccctagcgcccgctcctttcgctttcttcccttcctttctcgccacgttcgccggctttccccgtcaagctctaaatcgggggctccctttagggttccgatttagtgctttacggcacctcgaccccaaaaaacttgatttgggtgatggttcacgtagtgggccatcgccctgatagacggtttttcgccctttgacgttggagtccacgttctttaatagtggactcttgttccaaactggaacaacactcaaccctatctcgggctattcttttgatttataagggattttgccgatttcggcctattggttaaaaaatgagctgatttaacaaaaatttaacgcgaattttaacaaaatattaacgtttacaattttatggtgcactctcagtacaatctgctctgatgccgcatagttaagccagccccgacacccgccaacacccgctgacgcgccctgacgggcttgtctgctcccggcatccgcttacagacaagctgtgaccgtctccgggagctgcatgtgtcagaggttttcaccgtcatcaccgaaacgcgcgagacgaaagggcctcgtgatacgcctatttttataggttaatgtcatgataataatggtttcttagacgtcaggtggcacttttcggggaaatgtgcgcggatcccctatttgtttatttttctaaatacattcaaatatgtatccgctcatgagacaataaccctgataaatgcttcaataatattgaaaaaggaagagtatgagtattcaacatttccgtgtcgcccttattcccttttttgcggcattttgccttcctgtttttgctcacccagaaacgctggtgaaagtaaaagatgctgaagatcagttgggtgcacgagtgggttacatcgaactggatctcaacagcggtaagatccttgagagttttcgccccgaagaacgttttccaatgatgagcacttttaaagttctgctatgtggcgcggtattatcccgtattgacgccgggcaagagcaactcggtcgccgcatacactattctcagaatgacttggttgagtactcaccagtcacagaaaagcatcttacggatggcatgacagtaagagaattatgcagtgctgccataaccatgagtgataacactgcggccaacttacttctgacaacgatcggaggaccgaaggagctaaccgcttttttgcacaacatgggggatcatgtaactcgccttgatcgttgggaaccggagctgaatgaagccataccaaacgacgagcgtgacaccacgatgcctgtagcaatggcaacaacgttgcgcaaactattaactggcgaactacttactctagcttcccggcaacaattaatagactggatggaggcggataaagttgcaggaccacttctgcgctcggcccttccggctggctggtttattgctgataaatctggagccggtgagcgtgggtctcgcggtatcattgcagcactggggccagatggtaagccctcccgtatcgtagttatctacacgacggggagtcaggcaactatggatgaacgaaatagacagatcgctgagataggtgcctcactgattaagcattggtaactgtcagaccaagtttactcatatatactttagattgatttaaaacttcatttttaatttaaaaggatctaggtgaagatcctttttgataatctcatgaccaaaatcccttaacgtgagttttcgttccactgagcgtcagaccccgtagaaaagatcaaaggatcttc

SEQ ID NO: 625 - DNA, 6504 bp, Artificial Sequence
  ssAAV.CAG.miR-1-1.XD-14887.GFP.SV40pA plasmid
  misc_feature (1)..(589): high-copy-number ColE1/pMB1/pBR322/pUC origin of replication
  misc_feature (877)..(898): CAP binding site
  misc_feature (913)..(943): lac promoter
  misc_feature (951)..(967): lac operator
  misc_feature (1018)..(1147): 5' ITR
  misc_feature (1190)..(1682): CMV enhancer
  misc_feature (1681)..(1982): Promoter
  misc_feature (1986)..(2079): Exon1
  misc_feature (2080)..(2957): Intron
  misc_feature (2962)..(3100): miR-1-1 XD-14887
  misc_feature (3143)..(3197): Beta globin exon
  misc_feature (3198)..(3203): Kozak
  misc_feature (3204)..(3920): enhanced GFP, mammalian codon-optimized
  misc_feature (3921)..(3950): c-myc tag
  misc_feature (3990)..(4211): SV40 polyA
  misc_feature (4253)..(4382): 3' ITR
  misc_feature (4632)..(5087): f1 bacteriophage origin of replication
  misc_feature (5369)..(5473): AmpR promoter
  misc_feature (5474)..(6334): bla
ttgagatcctttttttctgcgcgtaatctgctgcttgcaaacaaaaaaaccaccgctaccagcggtggtttgtttgccggatcaagagctaccaactctttttccgaaggtaactggcttcagcagagcgcagataccaaatactgttcttctagtgtagccgtagttaggccaccacttcaagaactctgtagcaccgcctacatacctcgctctgctaatcctgttaccagtggctgctgccagtggcgataagtcgtgtcttaccgggttggactcaagacgatagttaccggataaggcgcagcggtcgggctgaacggggggttcgtgcacacagcccagcttggagcgaacgacctacaccgaactgagatacctacagcgtgagctatgagaaagcgccacgcttcccgaagggagaaaggcggacaggtatccggtaagcggcagggtcggaacaggagagcgcacgagggagcttccagggggaaacgcctggtatctttatagtcctgtcgggtttcgccacctctgacttgagcgtcgatttttgtgatgctcgtcaggggggcggagcctatggaaaaacgccagcaacgcggcctttttacggttcctggccttttgctggccttttgctcacatgttctttcctgcgttatcccctgattctgtggataaccgtattaccgcctttgagtgagctgataccgctcgccgcagccgaacgaccgagcgcagcgagtcagtgagcgaggaagcggaagagcgcccaatacgcaaaccgcctctccccgcgcgttggccgattcattaatgcagctggcacgacaggtttcccgactggaaagcgggcagtgagcgcaacgcaattaatgtgagttagctcactcattaggcaccccaggctttacactttatgcttccggctcgtatgttgtgtggaattgtgagcggataacaatttcacacaggaaacagctatgaccatgattacgaattgcctgcaggcagctgcgcgctcgctcgctcactgaggccgcccgggcaaagcccgggcgtcgggcgacctttggtcgcccggcctcagtgagcgagcgagcgcgcagagagggagtggccaactccatcactaggggttccttgtagttaatgattaacccgccatgctacttatctactcgagtcaatattggccattagccatattattcattggttatatagcataaatcaatattggctattggccattgcatacgttgtatctatatcataatatgtacatttatattggctcatgtccaatatgaccgccatgttggcattgattattgactagttattaatagtaatcaattacggggtcattagttcatagcccatatatggagttccgcgttacataacttacggtaaatggcccgcctggctgaccgcccaacgacccccgcccattgacgtcaataatgacgtatgttcccatagtaacgccaatagggactttccattgacgtcaatgggtggagtatttacggtaaactgcccacttggcagtacatcaagtgtatcatatgccaagtccgccccctattgacgtcaatgacggtaaatggcccgcctggcattatgcccagtacatgaccttacgggactttcctacttggcagtacatctacgtattagtcatcgctattaccatggtcgaggtgagccccacgttctgcttcactctccccatctcccccccctccccacccccaattttgtatttatttattttttaattattttgtgcagcgatgggggcggggggggggggggggcgcgcgccaggcggggcggggcggggcgaggggcggggcggggcgaggcggagaggtgcggcggcagccaatcagagcggcgcgctccgaaagtttccttttatggcgaggcggcggcggcggcggccctataaaaagcgaagcgcgcggcgggcgggagtcgctgcgacgctgccttcgccccgtgccccgctccgccgccgcctcgcgccgcccgccccggctctgactgaccgcgttactcccacaggtgagcgggcgggacggcccttctcctccgggctgtaattagcgcttggtttaatgacggcttgtttcttttctgtggctgcgtgaaagccttgaggggctccgggagggccctttgtgcgggggggagcggctcggggggtgcgtgcgtgtgtgtgtgcgtggggagcgccgcgtgcggcccgcgctgcccggcggctgtgagcgctgcgggcgcggcgcggggctttgtgcgctccgcagtgtgcgcgaggggagcgcggccgggggcggtgccccgcggtgcggggggggctgcgaggggaacaaaggctgcgtgcggggtgtgtgcgtgggggggtgagcagggggtgtgggcgcggcggtcgggctgtaacccccccctgcacccccctccccgagttgctgagcacggcccggcttcgggtgcggggctccgtacggggcgtggcgcggggctcgccgtgccgggcggggggtggcggcaggtgggggtgccgggcggggcggggccgcctcgggccggggagggctcgggggaggggcgcggcggcccccggagcgccggcggctgtcgaggcgcggcgagccgcagccattgccttttatggtaatcgtgcgagagggcgcagggacttcctttgtcccaaatctgtgcggagccgaaatctgggaggcgccgccgcaccccctctagcgggcgcggggcgaagcggtgcggcgccggcaggaaggaaatgggcggggagggccttcgtgcgtcgccgcgccgccgtccccttctccctctccagcctcggggctgtccgcggggggacggctgccttcgggggggacggggcagggcggggttcggcttctggcgtgtgaccggcggctctagcatgcagactgcctgcttgggagcaaatatgccccaacactcgatatggacctgctaagctatcgctgttggggcatatttggtctcaggccgggacctctctcgccgcactgaggggcactccacaccacgggggccgagcctctgctaaccatgttcatgccttcttctttttcctacagctcctgggcaacgtgctggttattgtgctgtctcatcattttggcaaagaattcacgacaatggtgagcaagggcgaggagctgttcaccggggtggtgcccatcctggtcgagctggacggcgacgtaaacggccacaagttcagcgtgtccggcgagggcgagggcgatgccacctacggcaagctgaccctgaagttcatctgcaccaccggcaagctgcccgtgccctggcccaccctcgtgaccaccctgacctacggcgtgcagtgcttcagccgctaccccgaccacatgaagcagcacgacttcttcaagtccgccatgcccgaaggctacgtccaggagcgcaccatcttcttcaaggacgacggcaactacaagacccgcgccgaggtgaagttcgagggcgacaccctggtgaaccgcatcgagctgaagggcatcgacttcaaggaggacggcaacatcctggggcacaagctggagtacaactacaacagccacaacgtctatatcatggccgacaagcagaagaacggcatcaaggtgaacttcaagatccgccacaacatcgaggacggcagcgttcagctcgccgaccactaccagcagaacacccccatcggcgacggccccgtgctgctgcccgacaaccactacctgagcacccagtccgccctgagcaaagaccccaacgagaagcgcgatcacatggtcctgctggagttcgtgaccgccgccgggatcactctcggcatggacgagctgtacaaggagcagaagctgatcagcgaggaggacctgtagcctgcaggggccctcgacccgggcggccgcttcgagcagacatgataagatacattgatgagtttggacaaaccacaactagaatgcagtgaaaaaaatgctttatttgtgaaatttgtgatgctattgctttatttgtaaccattataagctgcaataaacaagttaacaacaacaattgcattcattttatgtttcaggttcagggggagatgtgggaggttttttaaagcaagtaaaacctctacaaatgtggtaaccggtagataagtagcatggcgggttaatcattaactacaaggaacccctagtgatggagttggccactccctctctgcgcgctcgctcgctcactgaggccgggcgaccaaaggtcgcccgacgcccgggctttgcccgggcggcctcagtgagcgagcgagcgcgcagctgcctgcaggcagcttggcactggccgtcgttttacaacgtcgtgactgggaaaaccctggcgttacccaacttaatcgccttgcagcacatccccctttcgccagctggcgtaatagcgaagaggcccgcaccgatcgcccttcccaacagttgcgcagcctgaatggcgaatggcgcctgatgcggtattttctccttacgcatctgtgcggtatttcacaccgcatacgtcaaagcaaccatagtacgcgccctgtagcggcgcattaagcgcggcgggtgtggtggttacgcgcagcgtgaccgctacacttgccagcgccctagcgcccgctcctttcgctttcttcccttcctttctcgccacgttcgccggctttccccgtcaagctctaaatcgggggctccctttagggttccgatttagtgctttacggcacctcgaccccaaaaaacttgatttgggtgatggttcacgtagtgggccatcgccctgatagacggtttttcgccctttgacgttggagtccacgttctttaatagtggactcttgttccaaactggaacaacactcaaccctatctcgggctattcttttgatttataagggattttgccgatttcggcctattggttaaaaaatgagctgatttaacaaaaatttaacgcgaattttaacaaaatattaacgtttacaattttatggtgcactctcagtacaatctgctctgatgccgcatagttaagccagccccgacacccgccaacacccgctgacgcgccctgacgggcttgtctgctcccggcatccgcttacagacaagctgtgaccgtctccgggagctgcatgtgtcagaggttttcaccgtcatcaccgaaacgcgcgagacgaaagggcctcgtgatacgcctatttttataggttaatgtcatgataataatggtttcttagacgtcaggtggcacttttcggggaaatgtgcgcggatcccctatttgtttatttttctaaatacattcaaatatgtatccgctcatgagacaataaccctgataaatgcttcaataatattgaaaaaggaagagtatgagtattcaacatttccgtgtcgcccttattcccttttttgcggcattttgccttcctgtttttgctcacccagaaacgctggtgaaagtaaaagatgctgaagatcagttgggtgcacgagtgggttacatcgaactggatctcaacagcggtaagatccttgagagttttcgccccgaagaacgttttccaatgatgagcacttttaaagttctgctatgtggcgcggtattatcccgtattgacgccgggcaagagcaactcggtcgccgcatacactattctcagaatgacttggttgagtactcaccagtcacagaaaagcatcttacggatggcatgacagtaagagaattatgcagtgctgccataaccatgagtgataacactgcggccaacttacttctgacaacgatcggaggaccgaaggagctaaccgcttttttgcacaacatgggggatcatgtaactcgccttgatcgttgggaaccggagctgaatgaagccataccaaacgacgagcgtgacaccacgatgcctgtagcaatggcaacaacgttgcgcaaactattaactggcgaactacttactctagcttcccggcaacaattaatagactggatggaggcggataaagttgcaggaccacttctgcgctcggcccttccggctggctggtttattgctgataaatctggagccggtgagcgtgggtctcgcggtatcattgcagcactggggccagatggtaagccctcccgtatcgtagttatctacacgacggggagtcaggcaactatggatgaacgaaatagacagatcgctgagataggtgcctcactgattaagcattggtaactgtcagaccaagtttactcatatatactttagattgatttaaaacttcatttttaatttaaaaggatctaggtgaagatcctttttgataatctcatgaccaaaatcccttaacgtgagttttcgttccactgagcgtcagaccccgtagaaaagatcaaaggatcttc

SEQ ID NO: 626 - DNA, 22 bp, Artificial Sequence
  Forward Primer
taagcctgcaggaattgcctag

SEQ ID NO: 627 - DNA, 23 bp, Artificial Sequence
  Reverse Primer
catgtctcgacctggcttactag

SEQ ID NO: 628 - DNA, 21 bp, Artificial Sequence
  Primer
catagcgtaaaaggagcaaca

SEQ ID NO: 629 - DNA, 20 bp, Artificial Sequence
  gATXN2_1 CRISPR Guide
aagttactcaccgtagactg

SEQ ID NO: 630 - DNA, 20 bp, Artificial Sequence
  gATXN2_2 CRISPR Guide
aatagagaagtcatatcctg

SEQ ID NO: 631 - DNA, 20 bp, Artificial Sequence
  gATXN2_3 CRISPR Guide
gtattggaaatacccccagt

SEQ ID NO: 632 - DNA, 20 bp, Artificial Sequence
  gNTC CRISPR Guide
gtagcgaacgtgtccggcgt

SEQ ID NO: 633 - DNA, 20 bp, Artificial Sequence
  gATXN2_4 CRISPR Guide
gtgagttcacctgcatccca

SEQ ID NO: 634 - DNA, 20 bp, Artificial Sequence
  gATXN2_5 CRISPR Guide
gctatcagtgctaaagtgaa

SEQ ID NO: 635 - DNA, 20 bp, Artificial Sequence
  gCD81 (cutting control that cuts the CD81 gene) CRISPR Guide
gttggcttcctgggctgcta

SEQ ID NO: 636 - DNA, 20 bp, Artificial Sequence
  Forward primer (ICE_gATXN2_1_set1_Fwd)
aagtttcctgaggcctcccc

SEQ ID NO: 637 - DNA, 20 bp, Artificial Sequence
  Reverse primer (ICE_gATXN2_1_set1_Rev)
tccaggcaagcagtgcatag

SEQ ID NO: 638 - DNA, 19 bp, Artificial Sequence
  Forward primer (ICE_gATXN2_1_set2_Fwd)
agtttcctgaggcctcccc

SEQ ID NO: 639 - DNA, 20 bp, Artificial Sequence
  Reverse primer (ICE_gATXN2_1_set2_Rev)
ccctacctgttgtgggtctc

SEQ ID NO: 640 - DNA, 20 bp, Artificial Sequence
  ICE_gATXN2_1_Rseq
agagccatccttaggtagcc

SEQ ID NO: 641 - DNA, 24 bp, Artificial Sequence
  ICE_gATXN2_1_Fseq
gaggtttaattgactcatgctctg

SEQ ID NO: 642 - DNA, 20 bp, Artificial Sequence
  Forward primer (ICE_gATXN2_5_set1_Fwd)
aaaacacaccggcatttccc

SEQ ID NO: 643 - DNA, 20 bp, Artificial Sequence
  Reverse primer (ICE_gATXN2_5_set1_Rev)
cctgggcaacagaacgagac

SEQ ID NO: 644 - DNA, 20 bp, Artificial Sequence
  Forward primer (ICE_gATXN2_5_set2_Fwd)
agcaaaacacaccggcattt

SEQ ID NO: 645 - DNA, 19 bp, Artificial Sequence
  Reverse primer (ICE_gATXN2_5_set2_Rev)
atcacgccactgcattcca

SEQ ID NO: 646 - DNA, 22 bp, Artificial Sequence
  ICE_gATXN2_5_Fseq
tcatgagcatccacaagaacag

SEQ ID NO: 647 - DNA, 24 bp, Artificial Sequence
  ICE_gATXN2_5_Rseq
acgtgtgtgagtgtaactgattgc

SEQ ID NO: 648 - DNA, 22 bp, Artificial Sequence
  ATXN2 Guide Sequence
taccacaacaaagtctgaacat

SEQ ID NO: 649 - DNA, 22 bp, Artificial Sequence
  ATXN2 Guide Sequence
ttaccacaacaaagtctgaaca

SEQ ID NO: 650 - DNA, 22 bp, Artificial Sequence
  ATXN2 Guide Sequence
ttgtaccacaacaaagtctgaa

SEQ ID NO: 651 - DNA, 22 bp, Artificial Sequence
  ATXN2 Guide Sequence
actgtaccacaacaaagtctga

SEQ ID NO: 652 - DNA, 22 bp, Artificial Sequence
  ATXN2 Guide Sequence
aactgtaccacaacaaagtctg

SEQ ID NO: 653 - DNA, 22 bp, Artificial Sequence
  ATXN2 Guide Sequence
aaactgtaccacaacaaagtct

SEQ ID NO: 654 - DNA, 22 bp, Artificial Sequence
  ATXN2 Guide Sequence
ttaaactgtaccacaacaaagt

SEQ ID NO: 655 - DNA, 22 bp, Artificial Sequence
  ATXN2 Guide Sequence
ttgctaactggtttgcccttgc

SEQ ID NO: 656 - DNA, 22 bp, Artificial Sequence
  ATXN2 Guide Sequence
tgggttgaaatctgaagtgtga

SEQ ID NO: 657 - DNA, 22 bp, Artificial Sequence
  ATXN2 Guide Sequence
tcgggttgaaatctgaagtgtg

SEQ ID NO: 658 - DNA, 22 bp, Artificial Sequence
  ATXN2 Guide Sequence
tgatgcaggactagcaggcgta

SEQ ID NO: 659 - DNA, 22 bp, Artificial Sequence
  ATXN2 Guide Sequence
tcgatgcaggactagcaggcgt

SEQ ID NO: 660 - DNA, 22 bp, Artificial Sequence
  ATXN2 Guide Sequence
tttcgatgcaggactagcaggc

SEQ ID NO: 661 - DNA, 22 bp, Artificial Sequence
  ATXN2 Guide Sequence
tgttcgatgcaggactagcagg

SEQ ID NO: 662 - DNA, 22 bp, Artificial Sequence
  ATXN2 Guide Sequence
ttgttcgatgcaggactagcag

SEQ ID NO: 663 - DNA, 22 bp, Artificial Sequence
  ATXN2 Guide Sequence
tctgttcgatgcaggactagca

SEQ ID NO: 664 - DNA, 22 bp, Artificial Sequence
  ATXN2 Guide Sequence
ttctgttcgatgcaggactagc

SEQ ID NO: 665 - DNA, 22 bp, Artificial Sequence
  ATXN2 Guide Sequence
tctctgttcgatgcaggactag

SEQ ID NO: 666 - DNA, 22 bp, Artificial Sequence
  ATXN2 Guide Sequence
tgagagaaggaacgtgggttga

SEQ ID NO: 667 - DNA, 22 bp, Artificial Sequence
  ATXN2 Guide Sequence
ttgagagaaggaacgtgggttg

SEQ ID NO: 668 - DNA, 22 bp, Artificial Sequence
  ATXN2 Guide Sequence
tctgagagaaggaacgtgggtt

SEQ ID NO: 669 - DNA, 22 bp, Artificial Sequence
  ATXN2 Guide Sequence
tgctgagagaaggaacgtgggt

SEQ ID NO: 670 - DNA, 22 bp, Artificial Sequence
  ATXN2 Guide Sequence
tggctgagagaaggaacgtggg

SEQ ID NO: 671 - DNA, 22 bp, Artificial Sequence
  ATXN2 Guide Sequence
ttggctgagagaaggaacgtgg

SEQ ID NO: 672 - DNA, 22 bp, Artificial Sequence
  ATXN2 Guide Sequence
tttggctgagagaaggaacgtg

SEQ ID NO: 673 - DNA, 22 bp, Artificial Sequence
  ATXN2 Guide Sequence
ttttggctgagagaaggaacgt

SEQ ID NO: 674 - DNA, 22 bp, Artificial Sequence
  ATXN2 Guide Sequence
tctttggctgagagaaggaacg

SEQ ID NO: 675 - DNA, 22 bp, Artificial Sequence
  ATXN2 Guide Sequence
tgctttggctgagagaaggaac

SEQ ID NO: 676 - DNA, 22 bp, Artificial Sequence
  ATXN2 Guide Sequence
aggctttggctgagagaaggaa

SEQ ID NO: 677 - DNA, 22 bp, Artificial Sequence
  ATXN2 Guide Sequence
aaggctttggctgagagaagga

SEQ ID NO: 678 - DNA, 22 bp, Artificial Sequence
  ATXN2 Guide Sequence
taaggctttggctgagagaagg

SEQ ID NO: 679 - DNA, 22 bp, Artificial Sequence
  ATXN2 Guide Sequence
agaaggctttggctgagagaag

SEQ ID NO: 680 - DNA, 22 bp, Artificial Sequence
  ATXN2 Guide Sequence
tagaaggctttggctgagagaa

SEQ ID NO: 681 - DNA, 22 bp, Artificial Sequence
  ATXN2 Guide Sequence
ttagaaggctttggctgagaga

SEQ ID NO: 682 - DNA, 22 bp, Artificial Sequence
  ATXN2 Guide Sequence
agtagaaggctttggctgagag

SEQ ID NO: 683 - DNA, 22 bp, Artificial Sequence
  ATXN2 Guide Sequence
tagtagaaggctttggctgaga

SEQ ID NO: 684 - DNA, 22 bp, Artificial Sequence
  ATXN2 Guide Sequence
ttagtagaaggctttggctgag

SEQ ID NO: 685 - DNA, 22 bp, Artificial Sequence
  ATXN2 Guide Sequence
tgtagtagaaggctttggctga

SEQ ID NO: 686 - DNA, 22 bp, Artificial Sequence
  ATXN2 Guide Sequence
tggtagtagaaggctttggctg

SEQ ID NO: 687 - DNA, 22 bp, Artificial Sequence
  ATXN2 Guide Sequence
tgaacaaggggctgatttggga

SEQ ID NO: 688 - DNA, 22 bp, Artificial Sequence
  ATXN2 Guide Sequence
ttgaacaaggggctgatttggg

SEQ ID NO: 689 - DNA, 22 bp, Artificial Sequence
  ATXN2 Guide Sequence
tctgaacaaggggctgatttgg

SEQ ID NO: 690 - DNA, 22 bp, Artificial Sequence
  ATXN2 Guide Sequence
tgtggcacatgctgaacaaggg

SEQ ID NO: 691 - DNA, 22 bp, Artificial Sequence
  ATXN2 Guide Sequence
ttgccatcattctagcattacc

SEQ ID NO: 692 - DNA, 22 bp, Artificial Sequence
  ATXN2 Guide Sequence
ttgctgggaaactattctgtgg

SEQ ID NO: 693 - DNA, 22 bp, Artificial Sequence
  ATXN2 Guide Sequence
tctgctgggaaactattctgtg

SEQ ID NO: 694 - DNA, 22 bp, Artificial Sequence
  ATXN2 Guide Sequence
tgctgctgggaaactattctgt

SEQ ID NO: 695 - DNA, 22 bp, Artificial Sequence
  ATXN2 Guide Sequence
tgaacgtgagaaggatggatcg

SEQ ID NO: 696 - DNA, 22 bp, Artificial Sequence
  ATXN2 Guide Sequence
ttgaacgtgagaaggatggatc

SEQ ID NO: 697 - DNA, 22 bp, Artificial Sequence
  ATXN2 Guide Sequence
tctgaacgtgagaaggatggat

SEQ ID NO: 698 - DNA, 22 bp, Artificial Sequence
  ATXN2 Guide Sequence
aactgttagcattcctattgga

SEQ ID NO: 699 - DNA, 22 bp, Artificial Sequence
  ATXN2 Guide Sequence
taactgttagcattcctattgg

SEQ ID NO: 700 - DNA, 22 bp, Artificial Sequence
  ATXN2 Guide Sequence
tgaactgttagcattcctattg

SEQ ID NO: 701 - DNA, 22 bp, Artificial Sequence
  ATXN2 Guide Sequence
ttgaactgttagcattcctatt

SEQ ID NO: 702 - DNA, 22 bp, Artificial Sequence
  ATXN2 Guide Sequence
agtgaactgttagcattcctat

SEQ ID NO: 703 - DNA, 22 bp, Artificial Sequence
  ATXN2 Guide Sequence
aagtgaactgttagcattccta

SEQ ID NO: 704 - DNA, 22 bp, Artificial Sequence
  ATXN2 Guide Sequence
taagtgaactgttagcattcct

SEQ ID NO: 705 - DNA, 22 bp, Artificial Sequence
  ATXN2 Guide Sequence
tcaagtgaactgttagcattcc

SEQ ID NO: 706 - DNA, 22 bp, Artificial Sequence
  ATXN2 Guide Sequence
tgcaagtgaactgttagcattc

SEQ ID NO: 707 - DNA, 22 bp, Artificial Sequence
  ATXN2 Guide Sequence
ttgcaagtgaactgttagcatt

SEQ ID NO: 708 - DNA, 22 bp, Artificial Sequence
  ATXN2 Guide Sequence
actgcaagtgaactgttagcat

SEQ ID NO: 709 - DNA, 22 bp, Artificial Sequence
  ATXN2 Guide Sequence
tactgcaagtgaactgttagca

SEQ ID NO: 710 - DNA, 22 bp, Artificial Sequence
  ATXN2 Guide Sequence
tcactgcaagtgaactgttagc

SEQ ID NO: 711 - DNA, 22 bp, Artificial Sequence
  ATXN2 Guide Sequence
tccactgcaagtgaactgttag

SEQ ID NO: 712 - DNA, 22 bp, Artificial Sequence
  ATXN2 Guide Sequence
ttccactgcaagtgaactgtta

SEQ ID NO: 713 - DNA, 22 bp, Artificial Sequence
  ATXN2 Guide Sequence
tttccactgcaagtgaactgtt

SEQ ID NO: 714 - DNA, 22 bp, Artificial Sequence
  ATXN2 Guide Sequence
tcttccactgcaagtgaactgt

SEQ ID NO: 715 - DNA, 22 bp, Artificial Sequence
  ATXN2 Guide Sequence
atcttccactgcaagtgaactg

SEQ ID NO: 716 - DNA, 22 bp, Artificial Sequence
  ATXN2 Guide Sequence
tatcttccactgcaagtgaact

SEQ ID NO: 717 - DNA, 22 bp, Artificial Sequence
  ATXN2 Guide Sequence
tggcaagcagagctggggtacc

SEQ ID NO: 718 - DNA, 22 bp, Artificial Sequence
  ATXN2 Guide Sequence
tcggcaagcagagctggggtac

SEQ ID NO: 719 - DNA, 22 bp, Artificial Sequence
  ATXN2 Guide Sequence
ttcggcaagcagagctggggta

SEQ ID NO: 720 - DNA, 22 bp, Artificial Sequence
  ATXN2 Guide Sequence
tttcggcaagcagagctggggt

SEQ ID NO: 721 - DNA, 22 bp, Artificial Sequence
  ATXN2 Guide Sequence
ttttcggcaagcagagctgggg

SEQ ID NO: 722 - DNA, 22 bp, Artificial Sequence
  ATXN2 Guide Sequence
agtttcggcaagcagagctggg

SEQ ID NO: 723 - DNA, 22 bp, Artificial Sequence
  ATXN2 Guide Sequence
tagtttcggcaagcagagctgg

SEQ ID NO: 724 - DNA, 22 bp, Artificial Sequence
  ATXN2 Guide Sequence
tcagtttcggcaagcagagctg

SEQ ID NO: 725 - DNA, 22 bp, Artificial Sequence
  ATXN2 Guide Sequence
tccagtttcggcaagcagagct

SEQ ID NO: 726 - DNA, 22 bp, Artificial Sequence
  ATXN2 Guide Sequence
ttccagtttcggcaagcagagc

SEQ ID NO: 727 - DNA, 22 bp, Artificial Sequence
  ATXN2 Guide Sequence
tttccagtttcggcaagcagag

SEQ ID NO: 728 - DNA, 22 bp, Artificial Sequence
  ATXN2 Guide Sequence
acttccagtttcggcaagcaga

SEQ ID NO: 729 - DNA, 22 bp, Artificial Sequence
  ATXN2 Guide Sequence
aacttccagtttcggcaagcag

SEQ ID NO: 730 - DNA, 22 bp, Artificial Sequence
  ATXN2 Guide Sequence
taacttccagtttcggcaagca

SEQ ID NO: 731 - DNA, 22 bp, Artificial Sequence
  ATXN2 Guide Sequence
ataacttccagtttcggcaagc

SEQ ID NO: 732 - DNA, 22 bp, Artificial Sequence
  ATXN2 Guide Sequence
aataacttccagtttcggcaag

SEQ ID NO: 733 - DNA, 22 bp, Artificial Sequence
  ATXN2 Guide Sequence
aaataacttccagtttcggcaa

SEQ ID NO: 734 - DNA, 22 bp, Artificial Sequence
  ATXN2 Guide Sequence
ataaataacttccagtttcggc

SEQ ID NO: 735 - DNA, 22 bp, Artificial Sequence
  ATXN2 Guide Sequence
aataaataacttccagtttcgg

SEQ ID NO: 736 - DNA, 22 bp, Artificial Sequence
  ATXN2 Guide Sequence
aaataaataacttccagtttcg

SEQ ID NO: 737 - DNA, 22 bp, Artificial Sequence
  ATXN2 Guide Sequence
aaaataaataacttccagtttc

SEQ ID NO: 738 - DNA, 22 bp, Artificial Sequence
  ATXN2 Guide Sequence
aaaaataaataacttccagttt

SEQ ID NO: 739 - DNA, 22 bp, Artificial Sequence
  ATXN2 Guide Sequence
atgactttcaagggttattaaa

SEQ ID NO: 740 - DNA, 22 bp, Artificial Sequence
  ATXN2 Guide Sequence
tatgactttcaagggttattaa

SEQ ID NO: 741 - DNA, 22 bp, Artificial Sequence
  ATXN2 Guide Sequence
tcatgactttcaagggttatta

SEQ ID NO: 742 - DNA, 22 bp, Artificial Sequence
  ATXN2 Guide Sequence
ttcatgactttcaagggttatt

SEQ ID NO: 743 - DNA, 22 bp, Artificial Sequence
  ATXN2 Guide Sequence
tttcatgactttcaagggttat

SEQ ID NO: 744 - DNA, 22 bp, Artificial Sequence
  ATXN2 Guide Sequence
tgttcatgactttcaagggtta

SEQ ID NO: 745 - DNA, 22 bp, Artificial Sequence
  ATXN2 Guide Sequence
ttgttcatgactttcaagggtt

SEQ ID NO: 746 - DNA, 22 bp, Artificial Sequence
  ATXN2 Guide Sequence
tgtgttcatgactttcaagggt

SEQ ID NO: 747 - DNA, 22 bp, Artificial Sequence
  ATXN2 Guide Sequence
atgtgttcatgactttcaaggg

SEQ ID NO: 748 - DNA, 22 bp, Artificial Sequence
  ATXN2 Guide Sequence
tatgtgttcatgactttcaagg

SEQ ID NO: 749 - DNA, 22 bp, Artificial Sequence
  ATXN2 Guide Sequence
tgatgtgttcatgactttcaag

SEQ ID NO: 750 - DNA, 22 bp, Artificial Sequence
  ATXN2 Guide Sequence
ttgatgtgttcatgactttcaa

SEQ ID NO: 751 - DNA, 22 bp, Artificial Sequence
  ATXN2 Guide Sequence
tctgatgtgttcatgactttca

SEQ ID NO: 752 - DNA, 22 bp, Artificial Sequence
  ATXN2 Guide Sequence
agctgatgtgttcatgactttc

SEQ ID NO: 753 - DNA, 22 bp, Artificial Sequence
  ATXN2 Guide Sequence
tagctgatgtgttcatgacttt

SEQ ID NO: 754 - DNA, 22 bp, Artificial Sequence
  ATXN2 Guide Sequence
ttagctgatgtgttcatgactt

SEQ ID NO: 755 - DNA, 22 bp, Artificial Sequence
  ATXN2 Guide Sequence
tctagctgatgtgttcatgact

SEQ ID NO: 756 - DNA, 22 bp, Artificial Sequence
  ATXN2 Guide Sequence
tgctagctgatgtgttcatgac

SEQ ID NO: 757 - DNA, 22 bp, Artificial Sequence
  ATXN2 Guide Sequence
ttgctagctgatgtgttcatga

SEQ ID NO: 758 - DNA, 22 bp, Artificial Sequence
  ATXN2 Guide Sequence
tttgctagctgatgtgttcatg

SEQ ID NO: 759 - DNA, 22 bp, Artificial Sequence
  ATXN2 Guide Sequence
ttttgctagctgatgtgttcat

SEQ ID NO: 760 - DNA, 22 bp, Artificial Sequence
  ATXN2 Guide Sequence
tcttttgctagctgatgtgttc

SEQ ID NO: 761 - DNA, 22 bp, Artificial Sequence
  16_2_format_passenger
atgttcagaccctgttgtggtt

SEQ ID NO: 762 - DNA, 22 bp, Artificial Sequence
  16_2_format_passenger
tgttcagactccgttgtggtat

SEQ ID NO: 763 - DNA, 22 bp, Artificial Sequence
  16_2_format_passenger
gttcagacttctttgtggtact

SEQ ID NO: 764 - DNA, 22 bp, Artificial Sequence
  16_2_format_passenger
ttcagacttttctgtggtacat

SEQ ID NO: 765 - DNA, 22 bp, Artificial Sequence
  16_2_format_passenger
tcagactttgccgtggtacaga

SEQ ID NO: 766 - DNA, 22 bp, Artificial Sequence
  16_2_format_passenger
cagactttgtcttggtacagta

SEQ ID NO: 767 - DNA, 22 bp, Artificial Sequence
  16_2_format_passenger
agactttgtttcggtacagtta

SEQ ID NO: 768 - DNA, 22 bp, Artificial Sequence
  16_2_format_passenger
actttgttgttttacagtttat

SEQ ID NO: 769 - DNA, 22 bp, Artificial Sequence
  16_2_format_passenger
gcaagggcaagacagttagcat

SEQ ID NO: 770 - DNA, 22 bp, Artificial Sequence
  16_2_format_passenger
tcacacttcatgtttcaaccct

SEQ ID NO: 771 - DNA, 22 bp, Artificial Sequence
  16_2_format_passenger
cacacttcaggcttcaacccgt

SEQ ID NO: 772 - DNA, 22 bp, Artificial Sequence
  16_2_format_passenger
acacttcagacctcaacccgat

SEQ ID NO: 773 - DNA, 22 bp, Artificial Sequence
  16_2_format_passenger
tacgcctgctgttcctgcatct

SEQ ID NO: 774 - DNA, 22 bp, Artificial Sequence
  16_2_format_passenger
acgcctgctatccctgcatcgt

SEQ ID NO: 775 - DNA, 22 bp, Artificial Sequence
  16_2_format_passenger
cgcctgctagcactgcatcgat

SEQ ID NO: 776 - DNA, 22 bp, Artificial Sequence
  16_2_format_passenger
gcctgctagtaatgcatcgaat

SEQ ID NO: 777 - DNA, 22 bp, Artificial Sequence
  16_2_format_passenger
cctgctagtcacgcatcgaact

SEQ ID NO: 778 - DNA, 22 bp, Artificial Sequence
  16_2_format_passenger
ctgctagtccctcatcgaacat

SEQ ID NO: 779 - DNA, 22 bp, Artificial Sequence
  16_2_format_passenger
tgctagtccttaatcgaacagt

SEQ ID NO: 780 - DNA, 22 bp, Artificial Sequence
  16_2_format_passenger
gctagtcctgagtcgaacagat

SEQ ID NO: 781 - DNA, 22 bp, Artificial Sequence
  16_2_format_passenger
ctagtcctgcgccgaacagagt

SEQ ID NO: 782 - DNA, 22 bp, Artificial Sequence
  16_2_format_passenger
tcaacccacgccccttctctct

SEQ ID NO: 783 - DNA, 22 bp, Artificial Sequence
  16_2_format_passenger
caacccacgtcacttctctcat

SEQ ID NO: 784 - DNA, 22 bp, Artificial Sequence
  16_2_format_passenger
aacccacgttaattctctcagt

SEQ ID NO: 785 - DNA, 22 bp, Artificial Sequence
  16_2_format_passenger
acccacgttcactctctcagct

SEQ ID NO: 786 - DNA, 22 bp, Artificial Sequence
  16_2_format_passenger
cccacgttccccctctcagcct

SEQ ID NO: 787 - DNA, 22 bp, Artificial Sequence
  16_2_format_passenger
ccacgttcctcatctcagccat

SEQ ID NO: 788 - DNA, 22 bp, Artificial Sequence
  16_2_format_passenger
cacgttccttacctcagccaat

SEQ ID NO: 789 - DNA, 22 bp, Artificial Sequence
  16_2_format_passenger
acgttccttccatcagccaaat

SEQ ID NO: 790 - DNA, 22 bp, Artificial Sequence
  16_2_format_passenger
cgttccttctaccagccaaagt

SEQ ID NO: 791 - DNA, 22 bp, Artificial Sequence
  16_2_format_passenger
gttccttctccaagccaaagct

SEQ ID NO: 792 - DNA, 22 bp, Artificial Sequence
  16_2_format_passenger
ttccttctctaggccaaagcca

SEQ ID NO: 793 - DNA, 22 bp, Artificial Sequence
  16_2_format_passenger
tccttctctcgtccaaagccta

SEQ ID NO: 794 - DNA, 22 bp, Artificial Sequence
  16_2_format_passenger
ccttctctcatacaaagccttt

SEQ ID NO: 795 - DNA, 22 bp, Artificial Sequence
  16_2_format_passenger
cttctctcagaaaaagccttca

SEQ ID NO: 796 - DNA, 22 bp, Artificial Sequence
  16_2_format_passenger
ttctctcagcagaagccttctt

SEQ ID NO: 797 - DNA, 22 bp, Artificial Sequence
  16_2_format_passenger
tctctcagccggagccttctat

SEQ ID NO: 798 - DNA, 22 bp, Artificial Sequence
  16_2_format_passenger
ctctcagccagggccttctaca

SEQ ID NO: 799 - DNA, 22 bp, Artificial Sequence
  16_2_format_passenger
tctcagccaagtccttctactt

SEQ ID NO: 800 - DNA, 22 bp, Artificial Sequence
  16_2_format_passenger
ctcagccaaatacttctactat

SEQ ID NO: 801 - DNA, 22 bp, Artificial Sequence
  16_2_format_passenger
tcagccaaagaattctactact

SEQ ID NO: 802 - DNA, 22 bp, Artificial Sequence
  16_2_format_passenger
cagccaaagcactctactacct

SEQ ID NO: 803 - DNA, 22 bp, Artificial Sequence
  16_2_format_passenger
tcccaaatcatacccttgttct

SEQ ID NO: 804 - DNA, 22 bp, Artificial Sequence
  16_2_format_passenger
cccaaatcagaaccttgttcat

SEQ ID NO: 805 - DNA, 22 bp, Artificial Sequence
  16_2_format_passenger
ccaaatcagcaacttgttcagt

SEQ ID NO: 806 - DNA, 22 bp, Artificial Sequence
  16_2_format_passenger
cccttgttcataatgtgccact

SEQ ID NO: 807 - DNA, 22 bp, Artificial Sequence
  16_2_format_passenger
ggtaatgctatgatgatggcat

SEQ ID NO: 808 - DNA, 22 bp, Artificial Sequence
  16_2_format_passenger
ccacagaatatcttcccagcat

SEQ ID NO: 809 - DNA, 22 bp, Artificial Sequence
  16_2_format_passenger
cacagaatagcctcccagcagt

SEQ ID NO: 810 - DNA, 22 bp, Artificial Sequence
  16_2_format_passenger
acagaatagtcccccagcagct

SEQ ID NO: 811 - DNA, 22 bp, Artificial Sequence
  16_2_format_passenger
cgatccatccccctcacgttct

SEQ ID NO: 812 - DNA, 22 bp, Artificial Sequence
  16_2_format_passenger
gatccatcctcatcacgttcat

SEQ ID NO: 813 - DNA, 22 bp, Artificial Sequence
  16_2_format_passenger
atccatccttaccacgttcagt

SEQ ID NO: 814 - DNA, 22 bp, Artificial Sequence
  16_2_format_passenger
tccaataggagcgctaacagta

SEQ ID NO: 815 - DNA, 22 bp, Artificial Sequence
  16_2_format_passenger
ccaataggaactctaacagttt

SEQ ID NO: 816 - DNA, 22 bp, Artificial Sequence
  16_2_format_passenger
caataggaattataacagttct

SEQ ID NO: 817 - DNA, 22 bp, Artificial Sequence
  16_2_format_passenger
aataggaatgacaacagttcat

SEQ ID NO: 818 - DNA, 22 bp, Artificial Sequence
  16_2_format_passenger
ataggaatgccgacagttcaca

SEQ ID NO: 819 - DNA, 22 bp, Artificial Sequence
  16_2_format_passenger
taggaatgctggcagttcacta

SEQ ID NO: 820 - DNA, 22 bp, Artificial Sequence
  16_2_format_passenger
aggaatgctagaagttcacttt

SEQ ID NO: 821 - DNA, 22 bp, Artificial Sequence
  16_2_format_passenger
ggaatgctaaaggttcacttgt

SEQ ID NO: 822 - DNA, 22 bp, Artificial Sequence
  16_2_format_passenger
gaatgctaacgtttcacttgct

SEQ ID NO: 823 - DNA, 22 bp, Artificial Sequence
  16_2_format_passenger
aatgctaacatctcacttgcat

SEQ ID NO: 824 - DNA, 22 bp, Artificial Sequence
  16_2_format_passenger
atgctaacagcccacttgcaga

SEQ ID NO: 825 - DNA, 22 bp, Artificial Sequence
  16_2_format_passenger
tgctaacagtcaacttgcagtt

SEQ ID NO: 826 - DNA, 22 bp, Artificial Sequence
  16_2_format_passenger
gctaacagttagcttgcagtgt

SEQ ID NO: 827 - DNA, 22 bp, Artificial Sequence
  16_2_format_passenger
ctaacagttcgattgcagtggt

SEQ ID NO: 828 - DNA, 22 bp, Artificial Sequence
  16_2_format_passenger
taacagttcaactgcagtggat

SEQ ID NO: 829 - DNA, 22 bp, Artificial Sequence
  16_2_format_passenger
aacagttcacccgcagtggaat

SEQ ID NO: 830 - DNA, 22 bp, Artificial Sequence
  16_2_format_passenger
acagttcactctcagtggaagt

SEQ ID NO: 831 - DNA, 22 bp, Artificial Sequence
  16_2_format_passenger
cagttcactttaagtggaagaa

SEQ ID NO: 832 - DNA, 22 bp, Artificial Sequence
  16_2_format_passenger
agttcacttgaggtggaagatt

SEQ ID NO: 833 - DNA, 22 bp, Artificial Sequence
  16_2_format_passenger
ggtaccccagacctgcttgcct

SEQ ID NO: 834 - DNA, 22 bp, Artificial Sequence
  16_2_format_passenger
gtaccccagccatgcttgccgt

SEQ ID NO: 835 - DNA, 22 bp, Artificial Sequence
  16_2_format_passenger
taccccagctacgcttgccgat

SEQ ID NO: 836 - DNA, 22 bp, Artificial Sequence
  16_2_format_passenger
accccagctcctcttgccgaat

SEQ ID NO: 837 - DNA, 22 bp, Artificial Sequence
  16_2_format_passenger
ccccagctcttattgccgaaat

SEQ ID NO: 838 - DNA, 22 bp, Artificial Sequence
  16_2_format_passenger
cccagctctgactgccgaaaca

SEQ ID NO: 839 - DNA, 22 bp, Artificial Sequence
  16_2_format_passenger
ccagctctgcccgccgaaactt

SEQ ID NO: 840 - DNA, 22 bp, Artificial Sequence
  16_2_format_passenger
cagctctgctctccgaaactgt

SEQ ID NO: 841 - DNA, 22 bp, Artificial Sequence
  16_2_format_passenger
agctctgctttacgaaactggt

SEQ ID NO: 842 - DNA, 22 bp, Artificial Sequence
  16_2_format_passenger
gctctgcttgaagaaactggat

SEQ ID NO: 843 - DNA, 22 bp, Artificial Sequence
  16_2_format_passenger
ctctgcttgcataaactggaat

SEQ ID NO: 844 - DNA, 22 bp, Artificial Sequence
  16_2_format_passenger
tctgcttgcctgaactggaaga

SEQ ID NO: 845 - DNA, 22 bp, Artificial Sequence
  16_2_format_passenger
ctgcttgccgggactggaagta

SEQ ID NO: 846 - DNA, 22 bp, Artificial Sequence
  16_2_format_passenger
tgcttgccgaggctggaagttt

SEQ ID NO: 847 - DNA, 22 bp, Artificial Sequence
  16_2_format_passenger
gcttgccgaagatggaagttaa

SEQ ID NO: 848 - DNA, 22 bp, Artificial Sequence
  16_2_format_passenger
cttgccgaaaacggaagttata

SEQ ID NO: 849 - DNA, 22 bp, Artificial Sequence
  16_2_format_passenger
ttgccgaaacctgaagttatta

SEQ ID NO: 850 - DNA, 22 bp, Artificial Sequence
  16_2_format_passenger
gccgaaactgtgagttatttaa

SEQ ID NO: 851 - DNA, 22 bp, Artificial Sequence
  16_2_format_passenger
ccgaaactgggggttatttata

SEQ ID NO: 852 - DNA, 22 bp, Artificial Sequence
  16_2_format_passenger
cgaaactggagtttatttatta

SEQ ID NO: 853 - DNA, 22 bp, Artificial Sequence
  16_2_format_passenger
gaaactggaatctatttattta

SEQ ID NO: 854 - DNA, 22 bp, Artificial Sequence
  16_2_format_passenger
aaactggaagccatttatttta

SEQ ID NO: 855 - DNA, 22 bp, Artificial Sequence
  16_2_format_passenger
tttaataaccactgaaagtcaa

SEQ ID NO: 856 - DNA, 22 bp, Artificial Sequence
  16_2_format_passenger
ttaataacccccgaaagtcatt

SEQ ID NO: 857 - DNA, 22 bp, Artificial Sequence
  16_2_format_passenger
taataaccctctaaagtcatgt

SEQ ID NO: 858 - DNA, 22 bp, Artificial Sequence
  16_2_format_passenger
aataaccctttgaagtcatgat

SEQ ID NO: 859 - DNA, 22 bp, Artificial Sequence
  16_2_format_passenger
ataacccttgggagtcatgaat

SEQ ID NO: 860 - DNA, 22 bp, Artificial Sequence
  16_2_format_passenger
taacccttgagggtcatgaact

SEQ ID NO: 861 - DNA, 22 bp, Artificial Sequence
  16_2_format_passenger
aacccttgaagttcatgaacat

SEQ ID NO: 862 - DNA, 22 bp, Artificial Sequence
  16_2_format_passenger
acccttgaaatccatgaacact

SEQ ID NO: 863 - DNA, 22 bp, Artificial Sequence
  16_2_format_passenger
cccttgaaagcaatgaacacaa

SEQ ID NO: 864 - DNA, 22 bp, Artificial Sequence
  16_2_format_passenger
ccttgaaagtagtgaacacatt

SEQ ID NO: 865 - DNA, 22 bp, Artificial Sequence
  16_2_format_passenger
cttgaaagtcgcgaacacatct

SEQ ID NO: 866 - DNA, 22 bp, Artificial Sequence
  16_2_format_passenger
ttgaaagtcactaacacatcat

SEQ ID NO: 867 - DNA, 22 bp, Artificial Sequence
  16_2_format_passenger
tgaaagtcattgacacatcagt

SEQ ID NO: 868 - DNA, 22 bp, Artificial Sequence
  16_2_format_passenger
gaaagtcatgggcacatcagca

SEQ ID NO: 869 - DNA, 22 bp, Artificial Sequence
  16_2_format_passenger
aaagtcatgagaacatcagctt

SEQ ID NO: 870 - DNA, 22 bp, Artificial Sequence
  16_2_format_passenger
aagtcatgaaagcatcagctat

SEQ ID NO: 871 - DNA, 22 bp, Artificial Sequence
  16_2_format_passenger
agtcatgaacgaatcagctagt

SEQ ID NO: 872 - DNA, 22 bp, Artificial Sequence
  16_2_format_passenger
gtcatgaacaagtcagctagct

SEQ ID NO: 873 - DNA, 22 bp, Artificial Sequence
  16_2_format_passenger
tcatgaacacgccagctagcat

SEQ ID NO: 874 - DNA, 22 bp, Artificial Sequence
  16_2_format_passenger
catgaacacacaagctagcaat

SEQ ID NO: 875 - DNA, 22 bp, Artificial Sequence
  16_2_format_passenger
atgaacacataggctagcaaat

SEQ ID NO: 876 - DNA, 22 bp, Artificial Sequence
  16_2_format_passenger
gaacacatcatatagcaaaagt

SEQ ID NO: 877 - DNA, 119 bp, Artificial Sequence
  Artificial miRNA
accggacatacttgttccactctaccacaacaaagtctgaacattagtgaaatatatattaaaatgttcagaccctgttgtggtttagtgtgacagggatacagcaactattttatcaa

SEQ ID NO: 878 - DNA, 119 bp, Artificial Sequence
  Artificial miRNA
accggacatacttgttccactcttaccacaacaaagtctgaacatagtgaaatatatattaaatgttcagactccgttgtggtattagtgtgacagggatacagcaactattttatcaa

SEQ ID NO: 879 - DNA, 119 bp, Artificial Sequence
  Artificial miRNA
accggacatacttgttccactctgtaccacaacaaagtctgaactagtgaaatatatattaaagttcagacttctttgtggtacttagtgtgacagggatacagcaactattttatcaa

SEQ ID NO: 880 - DNA, 119 bp, Artificial Sequence
  Artificial miRNA
accggacatacttgttccactcttgtaccacaacaaagtctgaatagtgaaatatatattaaattcagacttttctgtggtacattagtgtgacagggatacagcaactattttatcaa

SEQ ID NO: 881 - DNA, 119 bp, Artificial Sequence
  Artificial miRNA
accggacatacttgttccactcactgtaccacaacaaagtctgatagtgaaatatatattaaatcagactttgccgtggtacagatagtgtgacagggatacagcaactattttatcaa

SEQ ID NO: 882 - DNA, 119 bp, Artificial Sequence
  Artificial miRNA
accggacatacttgttccactcaactgtaccacaacaaagtctgtagtgaaatatatattaaacagactttgtcttggtacagtatagtgtgacagggatacagcaactattttatcaa

SEQ ID NO: 883 - DNA, 119 bp, Artificial Sequence
  Artificial miRNA
accggacatacttgttccactcaaactgtaccacaacaaagtcttagtgaaatatatattaaaagactttgtttcggtacagttatagtgtgacagggatacagcaactattttatcaa

SEQ ID NO: 884 - DNA, 119 bp, Artificial Sequence
  Artificial miRNA
accggacatacttgttccactcttaaactgtaccacaacaaagttagtgaaatatatattaaaactttgttgttttacagtttattagtgtgacagggatacagcaactattttatcaa

SEQ ID NO: 885 - DNA, 119 bp, Artificial Sequence
  Artificial miRNA
accggacatacttgttccactcttgctaactggtttgcccttgctagtgaaatatatattaaagcaagggcaagacagttagcattagtgtgacagggatacagcaactattttatcaa

SEQ ID NO: 886 - DNA, 119 bp, Artificial Sequence
  Artificial miRNA
accggacatacttgttccactctgggttgaaatctgaagtgtgatagtgaaatatatattaaatcacacttcatgtttcaacccttagtgtgacagggatacagcaactattttatcaa

SEQ ID NO: 887 - DNA, 119 bp, Artificial Sequence
  Artificial miRNA
accggacatacttgttccactctcgggttgaaatctgaagtgtgtagtgaaatatatattaaacacacttcaggcttcaacccgttagtgtgacagggatacagcaactattttatcaa

SEQ ID NO: 888 - DNA, 119 bp, Artificial Sequence
  Artificial miRNA
accggacatacttgttccactcttcgggttgaaatctgaagtgttagtgaaatatatattaaaacacttcagacctcaacccgattagtgtgacagggatacagcaactattttatcaa

SEQ ID NO: 889 - DNA, 119 bp, Artificial Sequence
  Artificial miRNA
accggacatacttgttccactctgatgcaggactagcaggcgtatagtgaaatatatattaaatacgcctgctgttcctgcatcttagtgtgacagggatacagcaactattttatcaa

SEQ ID NO: 890 - DNA, 119 bp, Artificial Sequence
  Artificial miRNA
accggacatacttgttccactctcgatgcaggactagcaggcgttagtgaaatatatattaaaacgcctgctatccctgcatcgttagtgtgacagggatacagcaactattttatcaa

SEQ ID NO: 891 - DNA, 119 bp, Artificial Sequence
  Artificial miRNA
accggacatacttgttccactcttcgatgcaggactagcaggcgtagtgaaatatatattaaacgcctgctagcactgcatcgattagtgtgacagggatacagcaactattttatcaa

SEQ ID NO: 892 - DNA, 119 bp, Artificial Sequence
  Artificial miRNA
accggacatacttgttccactctttcgatgcaggactagcaggctagtgaaatatatattaaagcctgctagtaatgcatcgaattagtgtgacagggatacagcaactattttatcaa

SEQ ID NO: 893 - DNA, 119 bp, Artificial Sequence
  Artificial miRNA
accggacatacttgttccactctgttcgatgcaggactagcaggtagtgaaatatatattaaacctgctagtcacgcatcgaacttagtgtgacagggatacagcaactattttatcaa

SEQ ID NO: 894 - DNA, 119 bp, Artificial Sequence
  Artificial miRNA
accggacatacttgttccactcttgttcgatgcaggactagcagtagtgaaatatatattaaactgctagtccctcatcgaacattagtgtgacagggatacagcaactattttatcaa

SEQ ID NO: 895 - DNA, 119 bp, Artificial Sequence
  Artificial miRNA
accggacatacttgttccactctctgttcgatgcaggactagcatagtgaaatatatattaaatgctagtccttaatcgaacagttagtgtgacagggatacagcaactattttatcaa

SEQ ID NO: 896 - DNA, 119 bp, Artificial Sequence
  Artificial miRNA
accggacatacttgttccactcttctgttcgatgcaggactagctagtgaaatatatattaaagctagtcctgagtcgaacagattagtgtgacagggatacagcaactattttatcaa

SEQ ID NO: 897 - DNA, 119 bp, Artificial Sequence
  Artificial miRNA
accggacatacttgttccactctctctgttcgatgcaggactagtagtgaaatatatattaaactagtcctgcgccgaacagagttagtgtgacagggatacagcaactattttatcaa

SEQ ID NO: 898 - DNA, 119 bp, Artificial Sequence
  Artificial miRNA
accggacatacttgttccactctgagagaaggaacgtgggttgatagtgaaatatatattaaatcaacccacgccccttctctcttagtgtgacagggatacagcaactattttatcaa

SEQ ID NO: 899 - DNA, 119 bp, Artificial Sequence
  Artificial miRNA
accggacatacttgttccactcttgagagaaggaacgtgggttgtagtgaaatatatattaaacaacccacgtcacttctctcattagtgtgacagggatacagcaactattttatcaa

SEQ ID NO: 900 - DNA, 119 bp, Artificial Sequence
  Artificial miRNA
accggacatacttgttccactctctgagagaaggaacgtgggtttagtgaaatatatattaaaaacccacgttaattctctcagttagtgtgacagggatacagcaactattttatcaa

SEQ ID NO: 901 - DNA, 119 bp, Artificial Sequence
  Artificial miRNA
accggacatacttgttccactctgctgagagaaggaacgtgggttagtgaaatatatattaaaacccacgttcactctctcagcttagtgtgacagggatacagcaactattttatcaa

SEQ ID NO: 902 - DNA, 119 bp, Artificial Sequence
  Artificial miRNA
accggacatacttgttccactctggctgagagaaggaacgtgggtagtgaaatatatattaaacccacgttccccctctcagccttagtgtgacagggatacagcaactattttatcaa

SEQ ID NO: 903 - DNA, 119 bp, Artificial Sequence
  Artificial miRNA
accggacatacttgttccactcttggctgagagaaggaacgtggtagtgaaatatatattaaaccacgttcctcatctcagccattagtgtgacagggatacagcaactattttatcaa

SEQ ID NO: 904 - DNA, 119 bp, Artificial Sequence
  Artificial miRNA
accggacatacttgttccactctttggctgagagaaggaacgtgtagtgaaatatatattaaacacgttccttacctcagccaattagtgtgacagggatacagcaactattttatcaa

SEQ ID NO: 905 - DNA, 119 bp, Artificial Sequence
  Artificial miRNA
accggacatacttgttccactcttttggctgagagaaggaacgttagtgaaatatatattaaaacgttccttccatcagccaaattagtgtgacagggatacagcaactattttatcaa

SEQ ID NO: 906 - DNA, 119 bp, Artificial Sequence
  Artificial miRNA
accggacatacttgttccactctctttggctgagagaaggaacgtagtgaaatatatattaaacgttccttctaccagccaaagttagtgtgacagggatacagcaactattttatcaa

SEQ ID NO: 907 - DNA, 119 bp, Artificial Sequence
  Artificial miRNA
accggacatacttgttccactctgctttggctgagagaaggaactagtgaaatatatattaaagttccttctccaagccaaagcttagtgtgacagggatacagcaactattttatcaa

SEQ ID NO: 908 - DNA, 119 bp, Artificial Sequence
  Artificial miRNA
accggacatacttgttccactcaggctttggctgagagaaggaatagtgaaatatatattaaattccttctctaggccaaagccatagtgtgacagggatacagcaactattttatcaa

SEQ ID NO: 909 - DNA, 119 bp, Artificial Sequence
  Artificial miRNA
accggacatacttgttccactcaaggctttggctgagagaaggatagtgaaatatatattaaatccttctctcgtccaaagcctatagtgtgacagggatacagcaactattttatcaa

SEQ ID NO: 910 - DNA, 119 bp, Artificial Sequence
  Artificial miRNA
accggacatacttgttccactctaaggctttggctgagagaaggtagtgaaatatatattaaaccttctctcatacaaagccttttagtgtgacagggatacagcaactattttatcaa

SEQ ID NO: 911 - DNA, 119 bp, Artificial Sequence
  Artificial miRNA
accggacatacttgttccactcagaaggctttggctgagagaagtagtgaaatatatattaaacttctctcagaaaaagccttcatagtgtgacagggatacagcaactattttatcaa

SEQ ID NO: 912 - DNA, 119 bp, Artificial Sequence
  Artificial miRNA
accggacatacttgttccactctagaaggctttggctgagagaatagtgaaatatatattaaattctctcagcagaagccttctttagtgtgacagggatacagcaactattttatcaa

SEQ ID NO: 913 - DNA, 119 bp, Artificial Sequence
  Artificial miRNA
accggacatacttgttccactcttagaaggctttggctgagagatagtgaaatatatattaaatctctcagccggagccttctattagtgtgacagggatacagcaactattttatcaa

SEQ ID NO: 914 - DNA, 119 bp, Artificial Sequence
  Artificial miRNA
accggacatacttgttccactcagtagaaggctttggctgagagtagtgaaatatatattaaactctcagccagggccttctacatagtgtgacagggatacagcaactattttatcaa

SEQ ID NO: 915 - DNA, 119 bp, Artificial Sequence
  Artificial miRNA
accggacatacttgttccactctagtagaaggctttggctgagatagtgaaatatatattaaatctcagccaagtccttctactttagtgtgacagggatacagcaactattttatcaa

SEQ ID NO: 916 - DNA, 119 bp, Artificial Sequence
  Artificial miRNA
accggacatacttgttccactcttagtagaaggctttggctgagtagtgaaatatatattaaactcagccaaatacttctactattagtgtgacagggatacagcaactattttatcaa

SEQ ID NO: 917 - DNA, 119 bp, Artificial Sequence
  Artificial miRNA
accggacatacttgttccactctgtagtagaaggctttggctgatagtgaaatatatattaaatcagccaaagaattctactacttagtgtgacagggatacagcaactattttatcaa

SEQ ID NO: 918 - DNA, 119 bp, Artificial Sequence
  Artificial miRNA
accggacatacttgttccactctggtagtagaaggctttggctgtagtgaaatatatattaaacagccaaagcactctactaccttagtgtgacagggatacagcaactattttatcaa

SEQ ID NO: 919 - DNA, 119 bp, Artificial Sequence
  Artificial miRNA
accggacatacttgttccactctgaacaaggggctgatttgggatagtgaaatatatattaaatcccaaatcatacccttgttcttagtgtgacagggatacagcaactattttatcaa

SEQ ID NO: 920 - DNA, 119 bp, Artificial Sequence
  Artificial miRNA
accggacatacttgttccactcttgaacaaggggctgatttgggtagtgaaatatatattaaacccaaatcagaaccttgttcattagtgtgacagggatacagcaactattttatcaa

SEQ ID NO: 921 - DNA, 119 bp, Artificial Sequence
  Artificial miRNA
accggacatacttgttccactctctgaacaaggggctgatttggtagtgaaatatatattaaaccaaatcagcaacttgttcagttagtgtgacagggatacagcaactattttatcaa

SEQ ID NO: 922 - DNA, 119 bp, Artificial Sequence
  Artificial miRNA
accggacatacttgttccactctgtggcacatgctgaacaagggtagtgaaatatatattaaacccttgttcataatgtgccacttagtgtgacagggatacagcaactattttatcaa

SEQ ID NO: 923 - DNA, 119 bp, Artificial Sequence
  Artificial miRNA
accggacatacttgttccactcttgccatcattctagcattacctagtgaaatatatattaaaggtaatgctatgatgatggcattagtgtgacagggatacagcaactattttatcaa

SEQ ID NO: 924 - DNA, 119 bp, Artificial Sequence
  Artificial miRNA
accggacatacttgttccactcttgctgggaaactattctgtggtagtgaaatatatattaaaccacagaatatcttcccagcattagtgtgacagggatacagcaactattttatcaa

SEQ ID NO: 925 - DNA, 119 bp, Artificial Sequence
  Artificial miRNA
accggacatacttgttccactctctgctgggaaactattctgtgtagtgaaatatatattaaacacagaatagcctcccagcagttagtgtgacagggatacagcaactattttatcaa

SEQ ID NO: 926 - DNA, 119 bp, Artificial Sequence
  Artificial miRNA
accggacatacttgttccactctgctgctgggaaactattctgttagtgaaatatatattaaaacagaatagtcccccagcagcttagtgtgacagggatacagcaactattttatcaa

SEQ ID NO: 927 - DNA, 119 bp, Artificial Sequence
  Artificial miRNA
accggacatacttgttccactctgaacgtgagaaggatggatcgtagtgaaatatatattaaacgatccatccccctcacgttcttagtgtgacagggatacagcaactattttatcaa

SEQ ID NO: 928 - DNA, 119 bp, Artificial Sequence
  Artificial miRNA
accggacatacttgttccactcttgaacgtgagaaggatggatctagtgaaatatatattaaagatccatcctcatcacgttcattagtgtgacagggatacagcaactattttatcaa

SEQ ID NO: 929 - DNA, 119 bp, Artificial Sequence
  Artificial miRNA
accggacatacttgttccactctctgaacgtgagaaggatggattagtgaaatatatattaaaatccatccttaccacgttcagttagtgtgacagggatacagcaactattttatcaa

SEQ ID NO: 930 - DNA, 119 bp, Artificial Sequence
  Artificial miRNA
accggacatacttgttccactcaactgttagcattcctattggatagtgaaatatatattaaatccaataggagcgctaacagtatagtgtgacagggatacagcaactattttatcaa

SEQ ID NO: 931 - DNA, 119 bp, Artificial Sequence
  Artificial miRNA
accggacatacttgttccactctaactgttagcattcctattggtagtgaaatatatattaaaccaataggaactctaacagttttagtgtgacagggatacagcaactattttatcaa

SEQ ID NO: 932 - DNA, 119 bp, Artificial Sequence
  Artificial miRNA
accggacatacttgttccactctgaactgttagcattcctattgtagtgaaatatatattaaacaataggaattataacagttcttagtgtgacagggatacagcaactattttatcaa

SEQ ID NO: 933 - DNA, 119 bp, Artificial Sequence
  Artificial miRNA
accggacatacttgttccactcttgaactgttagcattcctatttagtgaaatatatattaaaaataggaatgacaacagttcattagtgtgacagggatacagcaactattttatcaa

SEQ ID NO: 934 - DNA, 119 bp, Artificial Sequence
  Artificial miRNA
accggacatacttgttccactcagtgaactgttagcattcctattagtgaaatatatattaaaataggaatgccgacagttcacatagtgtgacagggatacagcaactattttatcaa

SEQ ID NO: 935 - DNA, 119 bp, Artificial Sequence
  Artificial miRNA
accggacatacttgttccactcaagtgaactgttagcattcctatagtgaaatatatattaaataggaatgctggcagttcactatagtgtgacagggatacagcaactattttatcaa

SEQ ID NO: 936 - DNA, 119 bp, Artificial Sequence
  Artificial miRNA
accggacatacttgttccactctaagtgaactgttagcattccttagtgaaatatatattaaaaggaatgctagaagttcacttttagtgtgacagggatacagcaactattttatcaa

SEQ ID NO: 937 - DNA, 119 bp, Artificial Sequence
  Artificial miRNA
accggacatacttgttccactctcaagtgaactgttagcattcctagtgaaatatatattaaaggaatgctaaaggttcacttgttagtgtgacagggatacagcaactattttatcaa

SEQ ID NO: 938 - DNA, 119 bp, Artificial Sequence
  Artificial miRNA
accggacatacttgttccactctgcaagtgaactgttagcattctagtgaaatatatattaaagaatgctaacgtttcacttgcttagtgtgacagggatacagcaactattttatcaa

SEQ ID NO: 939 - DNA, 119 bp, Artificial Sequence
  Artificial miRNA
accggacatacttgttccactcttgcaagtgaactgttagcatttagtgaaatatatattaaaaatgctaacatctcacttgcattagtgtgacagggatacagcaactattttatcaa

SEQ ID NO: 940 - DNA, 119 bp, Artificial Sequence
  Artificial miRNA
accggacatacttgttccactcactgcaagtgaactgttagcattagtgaaatatatattaaaatgctaacagcccacttgcagatagtgtgacagggatacagcaactattttatcaa

SEQ ID NO: 941 - DNA, 119 bp, Artificial Sequence
  Artificial miRNA
accggacatacttgttccactctactgcaagtgaactgttagcatagtgaaatatatattaaatgctaacagtcaacttgcagtttagtgtgacagggatacagcaactattttatcaa

SEQ ID NO: 942 - DNA, 119 bp, Artificial Sequence
  Artificial miRNA
accggacatacttgttccactctcactgcaagtgaactgttagctagtgaaatatatattaaagctaacagttagcttgcagtgttagtgtgacagggatacagcaactattttatcaa

SEQ ID NO: 943 - DNA, 119 bp, Artificial Sequence
  Artificial miRNA
accggacatacttgttccactctccactgcaagtgaactgttagtagtgaaatatatattaaactaacagttcgattgcagtggttagtgtgacagggatacagcaactattttatcaa

SEQ ID NO: 944 - DNA, 119 bp, Artificial Sequence
  Artificial miRNA
accggacatacttgttccactcttccactgcaagtgaactgttatagtgaaatatatattaaataacagttcaactgcagtggattagtgtgacagggatacagcaactattttatcaa

SEQ ID NO: 945 - DNA, 119 bp, Artificial Sequence
  Artificial miRNA
accggacatacttgttccactctttccactgcaagtgaactgtttagtgaaatatatattaaaaacagttcacccgcagtggaattagtgtgacagggatacagcaactattttatcaa

SEQ ID NO: 946 - DNA, 119 bp, Artificial Sequence
  Artificial miRNA
accggacatacttgttccactctcttccactgcaagtgaactgttagtgaaatatatattaaaacagttcactctcagtggaagttagtgtgacagggatacagcaactattttatcaa

SEQ ID NO: 947 - DNA, 119 bp, Artificial Sequence
  Artificial miRNA
accggacatacttgttccactcatcttccactgcaagtgaactgtagtgaaatatatattaaacagttcactttaagtggaagaatagtgtgacagggatacagcaactattttatcaa

SEQ ID NO: 948 - DNA, 119 bp, Artificial Sequence
  Artificial miRNA
accggacatacttgttccactctatcttccactgcaagtgaacttagtgaaatatatattaaaagttcacttgaggtggaagatttagtgtgacagggatacagcaactattttatcaa

SEQ ID NO: 949 - DNA, 119 bp, Artificial Sequence
  Artificial miRNA
accggacatacttgttccactctggcaagcagagctggggtacctagtgaaatatatattaaaggtaccccagacctgcttgccttagtgtgacagggatacagcaactattttatcaa

SEQ ID NO: 950 - DNA, 119 bp, Artificial Sequence
  Artificial miRNA
accggacatacttgttccactctcggcaagcagagctggggtactagtgaaatatatattaaagtaccccagccatgcttgccgttagtgtgacagggatacagcaactattttatcaa

SEQ ID NO: 951 - DNA, 119 bp, Artificial Sequence
  Artificial miRNA
accggacatacttgttccactcttcggcaagcagagctggggtatagtgaaatatatattaaataccccagctacgcttgccgattagtgtgacagggatacagcaactattttatcaa

SEQ ID NO: 952 - DNA, 119 bp, Artificial Sequence
  Artificial miRNA
accggacatacttgttccactctttcggcaagcagagctggggttagtgaaatatatattaaaaccccagctcctcttgccgaattagtgtgacagggatacagcaactattttatcaa

SEQ ID NO: 953 - DNA, 119 bp, Artificial Sequence
  Artificial miRNA
accggacatacttgttccactcttttcggcaagcagagctggggtagtgaaatatatattaaaccccagctcttattgccgaaattagtgtgacagggatacagcaactattttatcaa

SEQ ID NO: 954 - DNA, 119 bp, Artificial Sequence
  Artificial miRNA
accggacatacttgttccactcagtttcggcaagcagagctgggtagtgaaatatatattaaacccagctctgactgccgaaacatagtgtgacagggatacagcaactattttatcaa

SEQ ID NO: 955 - DNA, 119 bp, Artificial Sequence
  Artificial miRNA
accggacatacttgttccactctagtttcggcaagcagagctggtagtgaaatatatattaaaccagctctgcccgccgaaactttagtgtgacagggatacagcaactattttatcaa

SEQ ID NO: 956 - DNA, 119 bp, Artificial Sequence
  Artificial miRNA
accggacatacttgttccactctcagtttcggcaagcagagctgtagtgaaatatatattaaacagctctgctctccgaaactgttagtgtgacagggatacagcaactattttatcaa

SEQ ID NO: 957 - DNA, 119 bp, Artificial Sequence
  Artificial miRNA
accggacatacttgttccactctccagtttcggcaagcagagcttagtgaaatatatattaaaagctctgctttacgaaactggttagtgtgacagggatacagcaactattttatcaa

SEQ ID NO: 958 - DNA, 119 bp, Artificial Sequence
  Artificial miRNA
accggacatacttgttccactcttccagtttcggcaagcagagctagtgaaatatatattaaagctctgcttgaagaaactggattagtgtgacagggatacagcaactattttatcaa

SEQ ID NO: 959 - DNA, 119 bp, Artificial Sequence
  Artificial miRNA
accggacatacttgttccactctttccagtttcggcaagcagagtagtgaaatatatattaaactctgcttgcataaactggaattagtgtgacagggatacagcaactattttatcaa

SEQ ID NO: 960 - DNA, 119 bp, Artificial Sequence
  Artificial miRNA
accggacatacttgttccactcacttccagtttcggcaagcagatagtgaaatatatattaaatctgcttgcctgaactggaagatagtgtgacagggatacagcaactattttatcaa

SEQ ID NO: 961 - DNA, 119 bp, Artificial Sequence
  Artificial miRNA
accggacatacttgttccactcaacttccagtttcggcaagcagtagtgaaatatatattaaactgcttgccgggactggaagtatagtgtgacagggatacagcaactattttatcaa

SEQ ID NO: 962 - DNA, 119 bp, Artificial Sequence
  Artificial miRNA
accggacatacttgttccactctaacttccagtttcggcaagcatagtgaaatatatattaaatgcttgccgaggctggaagttttagtgtgacagggatacagcaactattttatcaa

SEQ ID NO: 963 - DNA, 119 bp, Artificial Sequence
  Artificial miRNA
accggacatacttgttccactcataacttccagtttcggcaagctagtgaaatatatattaaagcttgccgaagatggaagttaatagtgtgacagggatacagcaactattttatcaa

SEQ ID NO: 964 - DNA, 119 bp, Artificial Sequence
  Artificial miRNA
accggacatacttgttccactcaataacttccagtttcggcaagtagtgaaatatatattaaacttgccgaaaacggaagttatatagtgtgacagggatacagcaactattttatcaa

SEQ ID NO: 965 - DNA, 119 bp, Artificial Sequence
  Artificial miRNA
accggacatacttgttccactcaaataacttccagtttcggcaatagtgaaatatatattaaattgccgaaacctgaagttattatagtgtgacagggatacagcaactattttatcaa

SEQ ID NO: 966 - DNA, 119 bp, Artificial Sequence
  Artificial miRNA
accggacatacttgttccactcataaataacttccagtttcggctagtgaaatatatattaaagccgaaactgtgagttatttaatagtgtgacagggatacagcaactattttatcaa

SEQ ID NO: 967 - DNA, 119 bp, Artificial Sequence
  Artificial miRNA
accggacatacttgttccactcaataaataacttccagtttcggtagtgaaatatatattaaaccgaaactgggggttatttatatagtgtgacagggatacagcaactattttatcaa

SEQ ID NO: 968 - DNA, 119 bp, Artificial Sequence
  Artificial miRNA
accggacatacttgttccactcaaataaataacttccagtttcgtagtgaaatatatattaaacgaaactggagtttatttattatagtgtgacagggatacagcaactattttatcaa

SEQ ID NO: 969 - DNA, 119 bp, Artificial Sequence
  Artificial miRNA
accggacatacttgttccactcaaaataaataacttccagtttctagtgaaatatatattaaagaaactggaatctatttatttatagtgtgacagggatacagcaactattttatcaa

SEQ ID NO: 970 - DNA, 119 bp, Artificial Sequence
  Artificial miRNA
accggacatacttgttccactcaaaaataaataacttccagttttagtgaaatatatattaaaaaactggaagccatttattttatagtgtgacagggatacagcaactattttatcaa

SEQ ID NO: 971 - DNA, 119 bp, Artificial Sequence
  Artificial miRNA
accggacatacttgttccactcatgactttcaagggttattaaatagtgaaatatatattaaatttaataaccactgaaagtcaatagtgtgacagggatacagcaactattttatcaa

SEQ ID NO: 972 - DNA, 119 bp, Artificial Sequence
  Artificial miRNA
accggacatacttgttccactctatgactttcaagggttattaatagtgaaatatatattaaattaataacccccgaaagtcatttagtgtgacagggatacagcaactattttatcaa

SEQ ID NO: 973 - DNA, 119 bp, Artificial Sequence
  Artificial miRNA
accggacatacttgttccactctcatgactttcaagggttattatagtgaaatatatattaaataataaccctctaaagtcatgttagtgtgacagggatacagcaactattttatcaa

SEQ ID NO: 974 - DNA, 119 bp, Artificial Sequence
  Artificial miRNA
accggacatacttgttccactcttcatgactttcaagggttatttagtgaaatatatattaaaaataaccctttgaagtcatgattagtgtgacagggatacagcaactattttatcaa

SEQ ID NO: 975 - DNA, 119 bp, Artificial Sequence
  Artificial miRNA
accggacatacttgttccactctttcatgactttcaagggttattagtgaaatatatattaaaataacccttgggagtcatgaattagtgtgacagggatacagcaactattttatcaa

SEQ ID NO: 976 - DNA, 119 bp, Artificial Sequence
  Artificial miRNA
accggacatacttgttccactctgttcatgactttcaagggttatagtgaaatatatattaaataacccttgagggtcatgaacttagtgtgacagggatacagcaactattttatcaa

SEQ ID NO: 977 - DNA, 119 bp, Artificial Sequence
  Artificial miRNA
accggacatacttgttccactcttgttcatgactttcaagggtttagtgaaatatatattaaaaacccttgaagttcatgaacattagtgtgacagggatacagcaactattttatcaa

SEQ ID NO: 978 - DNA, 119 bp, Artificial Sequence
  Artificial miRNA
accggacatacttgttccactctgtgttcatgactttcaagggttagtgaaatatatattaaaacccttgaaatccatgaacacttagtgtgacagggatacagcaactattttatcaa

SEQ ID NO: 979 - DNA, 119 bp, Artificial Sequence
  Artificial miRNA
accggacatacttgttccactcatgtgttcatgactttcaagggtagtgaaatatatattaaacccttgaaagcaatgaacacaatagtgtgacagggatacagcaactattttatcaa

SEQ ID NO: 980 - DNA, 119 bp, Artificial Sequence
  Artificial miRNA
accggacatacttgttccactctatgtgttcatgactttcaaggtagtgaaatatatattaaaccttgaaagtagtgaacacatttagtgtgacagggatacagcaactattttatcaa

SEQ ID NO: 981 - DNA, 119 bp, Artificial Sequence
  Artificial miRNA
accggacatacttgttccactctgatgtgttcatgactttcaagtagtgaaatatatattaaacttgaaagtcgcgaacacatcttagtgtgacagggatacagcaactattttatcaa

SEQ ID NO: 982 - DNA, 119 bp, Artificial Sequence
  Artificial miRNA
accggacatacttgttccactcttgatgtgttcatgactttcaatagtgaaatatatattaaattgaaagtcactaacacatcattagtgtgacagggatacagcaactattttatcaa

SEQ ID NO: 983 - DNA, 119 bp, Artificial Sequence
  Artificial miRNA
accggacatacttgttccactctctgatgtgttcatgactttcatagtgaaatatatattaaatgaaagtcattgacacatcagttagtgtgacagggatacagcaactattttatcaa

SEQ ID NO: 984 - DNA, 119 bp, Artificial Sequence
  Artificial miRNA
accggacatacttgttccactcagctgatgtgttcatgactttctagtgaaatatatattaaagaaagtcatgggcacatcagcatagtgtgacagggatacagcaactattttatcaa

SEQ ID NO: 985 - DNA, 119 bp, Artificial Sequence
  Artificial miRNA
accggacatacttgttccactctagctgatgtgttcatgacttttagtgaaatatatattaaaaaagtcatgagaacatcagctttagtgtgacagggatacagcaactattttatcaa

SEQ ID NO: 986 - DNA, 119 bp, Artificial Sequence
  Artificial miRNA
accggacatacttgttccactcttagctgatgtgttcatgactttagtgaaatatatattaaaaagtcatgaaagcatcagctattagtgtgacagggatacagcaactattttatcaa

SEQ ID NO: 987 - DNA, 119 bp, Artificial Sequence
  Artificial miRNA
accggacatacttgttccactctctagctgatgtgttcatgacttagtgaaatatatattaaaagtcatgaacgaatcagctagttagtgtgacagggatacagcaactattttatcaa

SEQ ID NO: 988 - DNA, 119 bp, Artificial Sequence
  Artificial miRNA
accggacatacttgttccactctgctagctgatgtgttcatgactagtgaaatatatattaaagtcatgaacaagtcagctagcttagtgtgacagggatacagcaactattttatcaa

SEQ ID NO: 989 - DNA, 119 bp, Artificial Sequence
  Artificial miRNA
accggacatacttgttccactcttgctagctgatgtgttcatgatagtgaaatatatattaaatcatgaacacgccagctagcattagtgtgacagggatacagcaactattttatcaa

SEQ ID NO: 990 - DNA, 119 bp, Artificial Sequence
  Artificial miRNA
accggacatacttgttccactctttgctagctgatgtgttcatgtagtgaaatatatattaaacatgaacacacaagctagcaattagtgtgacagggatacagcaactattttatcaa

SEQ ID NO: 991 - DNA, 119 bp, Artificial Sequence
  Artificial miRNA
accggacatacttgttccactcttttgctagctgatgtgttcattagtgaaatatatattaaaatgaacacataggctagcaaattagtgtgacagggatacagcaactattttatcaa

SEQ ID NO: 992 - DNA, 119 bp, Artificial Sequence
  Artificial miRNA
accggacatacttgttccactctcttttgctagctgatgtgttctagtgaaatatatattaaagaacacatcatatagcaaaagttagtgtgacagggatacagcaactattttatcaa

SEQ ID NO: 993 - RNA, 20 nt, Artificial Sequence
  siRNA Passenger
auguucagacuuuguugugg

SEQ ID NO: 994 - RNA, 20 nt, Artificial Sequence
  siRNA Passenger
uguucagacuuuguuguggu

SEQ ID NO: 995 - RNA, 20 nt, Artificial Sequence
  siRNA Passenger
guucagacuuuguuguggua

SEQ ID NO: 996 - RNA, 20 nt, Artificial Sequence
  siRNA Passenger
uucagacuuuguugugguac

SEQ ID NO: 997 - RNA, 20 nt, Artificial Sequence
  siRNA Passenger
ucagacuuuguugugguaca

SEQ ID NO: 998 - RNA, 20 nt, Artificial Sequence
  siRNA Passenger
cagacuuuguugugguacag

SEQ ID NO: 999 - RNA, 20 nt, Artificial Sequence
  siRNA Passenger
agacuuuguugugguacagu

SEQ ID NO: 1000 - RNA, 20 nt, Artificial Sequence
  siRNA Passenger
acuuuguugugguacaguuu

SEQ ID NO: 1001 - RNA, 20 nt, Artificial Sequence
  siRNA Passenger
gcaagggcaaaccaguuagc

SEQ ID NO: 1002 - RNA, 20 nt, Artificial Sequence
  siRNA Passenger
ucacacuucagauuucaacc

SEQ ID NO: 1003 - RNA, 20 nt, Artificial Sequence
  siRNA Passenger
cacacuucagauuucaaccc

SEQ ID NO: 1004 - RNA, 20 nt, Artificial Sequence
  siRNA Passenger
acacuucagauuucaacccg

SEQ ID NO: 1005 - RNA, 20 nt, Artificial Sequence
  siRNA Passenger
uacgccugcuaguccugcau

SEQ ID NO: 1006 - RNA, 20 nt, Artificial Sequence
  siRNA Passenger
acgccugcuaguccugcauc

SEQ ID NO: 1007 - RNA, 20 nt, Artificial Sequence
  siRNA Passenger
cgccugcuaguccugcaucg

SEQ ID NO: 1008 - RNA, 20 nt, Artificial Sequence
  siRNA Passenger
gccugcuaguccugcaucga

SEQ ID NO: 1009 - RNA, 20 nt, Artificial Sequence
  siRNA Passenger
ccugcuaguccugcaucgaa

SEQ ID NO: 1010 - RNA, 20 nt, Artificial Sequence
  siRNA Passenger
cugcuaguccugcaucgaac

SEQ ID NO: 1011 - RNA, 20 nt, Artificial Sequence
  siRNA Passenger
ugcuaguccugcaucgaaca

SEQ ID NO: 1012 - RNA, 20 nt, Artificial Sequence
  siRNA Passenger
gcuaguccugcaucgaacag

SEQ ID NO: 1013 - RNA, 20 nt, Artificial Sequence
  siRNA Passenger
cuaguccugcaucgaacaga

SEQ ID NO: 1014 - RNA, 20 nt, Artificial Sequence
  siRNA Passenger
ucaacccacguuccuucucu

SEQ ID NO: 1015 - RNA, 20 nt, Artificial Sequence
  siRNA Passenger
caacccacguuccuucucuc

SEQ ID NO: 1016 - RNA, 20 nt, Artificial Sequence
  siRNA Passenger
aacccacguuccuucucuca

SEQ ID NO: 1017 - RNA, 20 nt, Artificial Sequence
  siRNA Passenger
acccacguuccuucucucag

SEQ ID NO: 1018 - RNA, 20 nt, Artificial Sequence
  siRNA Passenger
cccacguuccuucucucagc

SEQ ID NO: 1019 - RNA, 20 nt, Artificial Sequence
  siRNA Passenger
ccacguuccuucucucagcc

SEQ ID NO: 1020 - RNA, 20 nt, Artificial Sequence
  siRNA Passenger
cacguuccuucucucagcca

SEQ ID NO: 1021 - RNA, 20 nt, Artificial Sequence
  siRNA Passenger
acguuccuucucucagccaa

SEQ ID NO: 1022 - RNA, 20 nt, Artificial Sequence
  siRNA Passenger
cguuccuucucucagccaaa

SEQ ID NO: 1023 - RNA, 20 nt, Artificial Sequence
  siRNA Passenger
guuccuucucucagccaaag

SEQ ID NO: 1024 - RNA, 20 nt, Artificial Sequence
  siRNA Passenger
uuccuucucucagccaaagc

SEQ ID NO: 1025 - RNA, 20 nt, Artificial Sequence
  siRNA Passenger
uccuucucucagccaaagcc

SEQ ID NO: 1026 - RNA, 20 nt, Artificial Sequence
  siRNA Passenger
ccuucucucagccaaagccu

SEQ ID NO: 1027 - RNA, 20 nt, Artificial Sequence
  siRNA Passenger
cuucucucagccaaagccuu

SEQ ID NO: 1028 - RNA, 20 nt, Artificial Sequence
  siRNA Passenger
uucucucagccaaagccuuc

SEQ ID NO: 1029 - RNA, 20 nt, Artificial Sequence
  siRNA Passenger
ucucucagccaaagccuucu

SEQ ID NO: 1030 - RNA, 20 nt, Artificial Sequence
  siRNA Passenger
cucucagccaaagccuucua

SEQ ID NO: 1031 - RNA, 20 nt, Artificial Sequence
  siRNA Passenger
ucucagccaaagccuucuac

SEQ ID NO: 1032 - RNA, 20 nt, Artificial Sequence
  siRNA Passenger
cucagccaaagccuucuacu

SEQ ID NO: 1033 - RNA, 20 nt, Artificial Sequence
  siRNA Passenger
ucagccaaagccuucuacua

SEQ ID NO: 1034 - RNA, 20 nt, Artificial Sequence
  siRNA Passenger
cagccaaagccuucuacuac

SEQ ID NO: 1035 - RNA, 20 nt, Artificial Sequence
  siRNA Passenger
ucccaaaucagccccuuguu

SEQ ID NO: 1036 - RNA, 20 nt, Artificial Sequence
  siRNA Passenger
cccaaaucagccccuuguuc

SEQ ID NO: 1037 - RNA, 20 nt, Artificial Sequence
  siRNA Passenger
ccaaaucagccccuuguuca

SEQ ID NO: 1038 - RNA, 20 nt, Artificial Sequence
  siRNA Passenger
cccuuguucagcaugugcca

SEQ ID NO: 1039 - RNA, 20 nt, Artificial Sequence
  siRNA Passenger
gguaaugcuagaaugauggc

SEQ ID NO: 1040 - RNA, 20 nt, Artificial Sequence
  siRNA Passenger
ccacagaauaguuucccagc

SEQ ID NO: 1041 - RNA, 20 nt, Artificial Sequence
  siRNA Passenger
cacagaauaguuucccagca

SEQ ID NO: 1042 - RNA, 20 nt, Artificial Sequence
  siRNA Passenger
acagaauaguuucccagcag

SEQ ID NO: 1043 - RNA, 20 nt, Artificial Sequence
  siRNA Passenger
cgauccauccuucucacguu

SEQ ID NO: 1044 - RNA, 20 nt, Artificial Sequence
  siRNA Passenger
gauccauccuucucacguuc

SEQ ID NO: 1045 - RNA, 20 nt, Artificial Sequence
  siRNA Passenger
auccauccuucucacguuca

SEQ ID NO: 1046 - RNA, 20 nt, Artificial Sequence
  siRNA Passenger
uccaauaggaaugcuaacag

SEQ ID NO: 1047 - RNA, 20 nt, Artificial Sequence
  siRNA Passenger
ccaauaggaaugcuaacagu

SEQ ID NO: 1048 - RNA, 20 nt, Artificial Sequence
  siRNA Passenger
caauaggaaugcuaacaguu

SEQ ID NO: 1049 - RNA, 20 nt, Artificial Sequence
  siRNA Passenger
aauaggaaugcuaacaguuc

SEQ ID NO: 1050 - RNA, 20 nt, Artificial Sequence
  siRNA Passenger
auaggaaugcuaacaguuca

SEQ ID NO: 1051 - RNA, 20 nt, Artificial Sequence
  siRNA Passenger
uaggaaugcuaacaguucac

SEQ ID NO: 1052 - RNA, 20 nt, Artificial Sequence
  siRNA Passenger
aggaaugcuaacaguucacu

SEQ ID NO: 1053 - RNA, 20 nt, Artificial Sequence
  siRNA Passenger
ggaaugcuaacaguucacuu

SEQ ID NO: 1054 - RNA, 20 nt, Artificial Sequence
  siRNA Passenger
gaaugcuaacaguucacuug

SEQ ID NO: 1055 - RNA, 20 nt, Artificial Sequence
  siRNA Passenger
aaugcuaacaguucacuugc

SEQ ID NO: 1056 - RNA, 20 nt, Artificial Sequence
  siRNA Passenger
augcuaacaguucacuugca

SEQ ID NO: 1057 - RNA, 20 nt, Artificial Sequence
  siRNA Passenger
ugcuaacaguucacuugcag

SEQ ID NO: 1058 - RNA, 20 nt, Artificial Sequence
  siRNA Passenger
gcuaacaguucacuugcagu

SEQ ID NO: 1059 - RNA, 20 nt, Artificial Sequence
  siRNA Passenger
cuaacaguucacuugcagug

SEQ ID NO: 1060 - RNA, 20 nt, Artificial Sequence
  siRNA Passenger
uaacaguucacuugcagugg

SEQ ID NO: 1061 - RNA, 20 nt, Artificial Sequence
  siRNA Passenger
aacaguucacuugcagugga

SEQ ID NO: 1062 - RNA, 20 nt, Artificial Sequence
  siRNA Passenger
acaguucacuugcaguggaa

SEQ ID NO: 1063 - RNA, 20 nt, Artificial Sequence
  siRNA Passenger
caguucacuugcaguggaag

SEQ ID NO: 1064 - RNA, 20 nt, Artificial Sequence
  siRNA Passenger
aguucacuugcaguggaaga

SEQ ID NO: 1065 - RNA, 20 nt, Artificial Sequence
  siRNA Passenger
gguaccccagcucugcuugc

SEQ ID NO: 1066 - RNA, 20 nt, Artificial Sequence
  siRNA Passenger
guaccccagcucugcuugcc

SEQ ID NO: 1067 - RNA, 20 nt, Artificial Sequence
  siRNA Passenger
uaccccagcucugcuugccg

SEQ ID NO: 1068 - RNA, 20 nt, Artificial Sequence
  siRNA Passenger
accccagcucugcuugccga

SEQ ID NO: 1069 - RNA, 20 nt, Artificial Sequence
  siRNA Passenger
ccccagcucugcuugccgaa

SEQ ID NO: 1070 - RNA, 20 nt, Artificial Sequence
  siRNA Passenger
cccagcucugcuugccgaaa

SEQ ID NO: 1071 - RNA, 20 nt, Artificial Sequence
  siRNA Passenger
ccagcucugcuugccgaaac

SEQ ID NO: 1072 - RNA, 20 nt, Artificial Sequence
  siRNA Passenger
cagcucugcuugccgaaacu

SEQ ID NO: 1073 - RNA, 20 nt, Artificial Sequence
  siRNA Passenger
agcucugcuugccgaaacug

SEQ ID NO: 1074 - RNA, 20 nt, Artificial Sequence
  siRNA Passenger
gcucugcuugccgaaacugg

SEQ ID NO: 1075 - RNA, 20 nt, Artificial Sequence
  siRNA Passenger
cucugcuugccgaaacugga

SEQ ID NO: 1076 - RNA, 20 nt, Artificial Sequence
  siRNA Passenger
ucugcuugccgaaacuggaa

SEQ ID NO: 1077 - RNA, 20 nt, Artificial Sequence
  siRNA Passenger
cugcuugccgaaacuggaag

SEQ ID NO: 1078 - RNA, 20 nt, Artificial Sequence
  siRNA Passenger
ugcuugccgaaacuggaagu

SEQ ID NO: 1079 - RNA, 20 nt, Artificial Sequence
  siRNA Passenger
gcuugccgaaacuggaaguu

SEQ ID NO: 1080 - RNA, 20 nt, Artificial Sequence
  siRNA Passenger
cuugccgaaacuggaaguua

SEQ ID NO: 1081 - RNA, 20 nt, Artificial Sequence
  siRNA Passenger
uugccgaaacuggaaguuau

SEQ ID NO: 1082 - RNA, 20 nt, Artificial Sequence
  siRNA Passenger
gccgaaacuggaaguuauuu

SEQ ID NO: 1083 - RNA, 20 nt, Artificial Sequence
  siRNA Passenger
ccgaaacuggaaguuauuua

SEQ ID NO: 1084 - RNA, 20 nt, Artificial Sequence
  siRNA Passenger
cgaaacuggaaguuauuuau

SEQ ID NO: 1085 - RNA, 20 nt, Artificial Sequence
  siRNA Passenger
gaaacuggaaguuauuuauu

SEQ ID NO: 1086 - RNA, 20 nt, Artificial Sequence
  siRNA Passenger
aaacuggaaguuauuuauuu

SEQ ID NO: 1087 - RNA, 20 nt, Artificial Sequence
  siRNA Passenger
uuuaauaacccuugaaaguc

SEQ ID NO: 1088 - RNA, 20 nt, Artificial Sequence
  siRNA Passenger
uuaauaacccuugaaaguca

SEQ ID NO: 1089 - RNA, 20 nt, Artificial Sequence
  siRNA Passenger
uaauaacccuugaaagucau

SEQ ID NO: 1090 - RNA, 20 nt, Artificial Sequence
  siRNA Passenger
aauaacccuugaaagucaug

SEQ ID NO: 1091 - RNA, 20 nt, Artificial Sequence
  siRNA Passenger
auaacccuugaaagucauga

SEQ ID NO: 1092 - RNA, 20 nt, Artificial Sequence
  siRNA Passenger
uaacccuugaaagucaugaa

SEQ ID NO: 1093 - RNA, 20 nt, Artificial Sequence
  siRNA Passenger
aacccuugaaagucaugaac

SEQ ID NO: 1094 - RNA, 20 nt, Artificial Sequence
  siRNA Passenger
acccuugaaagucaugaaca

SEQ ID NO: 1095 - RNA, 20 nt, Artificial Sequence
  siRNA Passenger
cccuugaaagucaugaacac

SEQ ID NO: 1096 - RNA, 20 nt, Artificial Sequence
  siRNA Passenger
ccuugaaagucaugaacaca

SEQ ID NO: 1097 - RNA, 20 nt, Artificial Sequence
  siRNA Passenger
cuugaaagucaugaacacau

SEQ ID NO: 1098 - RNA, 20 nt, Artificial Sequence
  siRNA Passenger
uugaaagucaugaacacauc

SEQ ID NO: 1099 - RNA, 20 nt, Artificial Sequence
  siRNA Passenger
ugaaagucaugaacacauca

SEQ ID NO: 1100 - RNA, 20 nt, Artificial Sequence
  siRNA Passenger
gaaagucaugaacacaucag

SEQ ID NO: 1101 - RNA, 20 nt, Artificial Sequence
  siRNA Passenger
aaagucaugaacacaucagc

SEQ ID NO: 1102 - RNA, 20 nt, Artificial Sequence
  siRNA Passenger
aagucaugaacacaucagcu

SEQ ID NO: 1103 - RNA, 20 nt, Artificial Sequence
  siRNA Passenger
agucaugaacacaucagcua

SEQ ID NO: 1104 - RNA, 20 nt, Artificial Sequence
  siRNA Passenger
gucaugaacacaucagcuag

SEQ ID NO: 1105 - RNA, 20 nt, Artificial Sequence
  siRNA Passenger
ucaugaacacaucagcuagc

SEQ ID NO: 1106 - RNA, 20 nt, Artificial Sequence
  siRNA Passenger
caugaacacaucagcuagca

SEQ ID NO: 1107 - RNA, 20 nt, Artificial Sequence
  siRNA Passenger
augaacacaucagcuagcaa

SEQ ID NO: 1108 - RNA, 20 nt, Artificial Sequence
  siRNA Passenger
gaacacaucagcuagcaaaa

SEQ ID NO: 1109 - RNA, 138 nt, Artificial Sequence; identical to SEQ ID NO: 455
  XD-14792_miR1-1 backbone, Artificial miRNA

SEQ ID NO: 1110 - RNA, 138 nt, Artificial Sequence
  XD-14792_miR1-1 enhanced backbone, Artificial miRNA
caugcagacugccugcuuggguacagaccaaagaguagucgaauuauggaccugcuaagcuaauuaacuacucuuuggucugaacucaggccgggaccucuuccgccgcacugaggggcacuccacaccacgggggcc

SEQ ID NO: 1111 - RNA, 138 nt, Artificial Sequence
  XD-14792_miR155 backbone, Artificial miRNA
ccuggaggcuugcugaaggcuguaugcugauuaacuacucuuuggucugaauuuuggccacugacugauucagaccaagguaguuaaucaggacacaaggccuguuacuagcacucacauggaacaaauggccaccgg

SEQ ID NO: 1112 - RNA, 138 nt, Artificial Sequence
  XD14792_911_miR155 backbone, Artificial miRNA
ccuggaggcuugcugaaggcuguaugcugauuaacuagaguuuggucugaauuuuggccacugacugauucagaccaaccuaguuaaucaggacacaaggccuguuacuagcacucacauggaacaaauggccaccgg

SEQ ID NO: 1113 - RNA, 138 nt, Artificial Sequence
  XD-14792_SScr miR155 backbone, Artificial miRNA
ccuggaggcuugcugaaggcuguaugcugauuaacuaaguaucggucucuuuuuuggccacugacugaaagagaccauauuaguuaaucaggacacaaggccuguuacuagcacucacauggaacaaauggccaccgg

SEQ ID NO: 1114 - RNA, 138 nt, Artificial Sequence
  XD-14792_miR155 sealed backbone, Artificial miRNA
ccuggaggcuugcugaaggcuguaugcugauuaacuacucuuuggucugaauuuuggccacugacugauucagaccaaagaguaguuaaucaggacacaaggccuguuacuagcacucacauggaacaaauggccacc

SEQ ID NO: 1115 - RNA, 138 nt, Artificial Sequence; identical to SEQ ID NO: 437
  XD-14857_miR-1-1_911 Control_amiRNA

SEQ ID NO: 1116 - RNA, 136 nt, Artificial Sequence; identical to SEQ ID NO: 438
  XD-14857_miR-155E_911 Control_amiRNA

SEQ ID NO: 1117 - RNA, 136 nt, Artificial Sequence; identical to SEQ ID NO: 439
  XD-14790_miR-155E_911 Control_amiRNA

SEQ ID NO: 1118 - RNA, 138 nt, Artificial Sequence; identical to SEQ ID NO: 440
  XD-14790_miR-1-1_911 Control_amiRNA

SEQ ID NO: 1119 - RNA, 136 nt, Artificial Sequence; identical to SEQ ID NO: 441
  XD-14800_miR-155E_911 Control_amiRNA

SEQ ID NO: 1120 - RNA, 138 nt, Artificial Sequence; identical to SEQ ID NO: 442
  XD-14800_miR-1-1_911 Control_amiRNA

SEQ ID NO: 1121 - RNA, 138 nt, Artificial Sequence; identical to SEQ ID NO: 443
  XD-14743_miR-1-1_amiRNA

SEQ ID NO: 1122 - RNA, 136 nt, Artificial Sequence; identical to SEQ ID NO: 444
  XD-14743_miR-155E_amiRNA

SEQ ID NO: 1123 - RNA, 138 nt, Artificial Sequence; identical to SEQ ID NO: 445
  XD-14766_ miR-1-1_amiRNA

SEQ ID NO: 1124 - RNA, 136 nt, Artificial Sequence; identical to SEQ ID NO: 446
  XD-14766_miR-155E_amiRNA

SEQ ID NO: 1125 - RNA, 136 nt, Artificial Sequence; identical to SEQ ID NO: 447
  XD-14904_miR-155E_amiRNA

SEQ ID NO: 1126 - RNA, 138 nt, Artificial Sequence; identical to SEQ ID NO: 448
  XD-14904_miR-1-1_amiRNA

SEQ ID NO: 1127 - RNA, 136 nt, Artificial Sequence; identical to SEQ ID NO: 449
  XD-14857_miR-155E_amiRNA

SEQ ID NO: 1128 - RNA, 138 nt, Artificial Sequence; identical to SEQ ID NO: 450
  XD-14857_miR-1-1_amiRNA

SEQ ID NO: 1129 - RNA, 136 nt, Artificial Sequence; identical to SEQ ID NO: 451
  XD-14949_miR-155E_amiRNA

SEQ ID NO: 1130 - RNA, 138 nt, Artificial Sequence; identical to SEQ ID NO: 452
  XD-14949_miR-1-1_amiRNA

SEQ ID NO: 1131 - RNA, 136 nt, Artificial Sequence; identical to SEQ ID NO: 453
  XD-14787_miR-155E_amiRNA

SEQ ID NO: 1132 - RNA, 138 nt, Artificial Sequence; identical to SEQ ID NO: 454
  XD-14787_miR-1-1_amiRNA

SEQ ID NO: 1133 - RNA, 138 nt, Artificial Sequence; identical to SEQ ID NO: 455
  XD-14792_miR-1-1_amiRNA

SEQ ID NO: 1134 - RNA, 136 nt, Artificial Sequence; identical to SEQ ID NO: 456
  XD-14792_miR-155E_amiRNA

SEQ ID NO: 1135 - RNA, 136 nt, Artificial Sequence; identical to SEQ ID NO: 457
  XD-14889_miR-155E_amiRNA

SEQ ID NO: 1136 - RNA, 138 nt, Artificial Sequence; identical to SEQ ID NO: 458
  XD-14889_miR-1-1_amiRNA

SEQ ID NO: 1137 - RNA, 136 nt, Artificial Sequence; identical to SEQ ID NO: 459
  XD-14798_miR-155E_amiRNA

SEQ ID NO: 1138 - RNA, 138 nt, Artificial Sequence; identical to SEQ ID NO: 460
  XD-14798_miR-1-1_amiRNA

SEQ ID NO: 1139 - RNA, 138 nt, Artificial Sequence; identical to SEQ ID NO: 461
  XD-14742_miR-1-1_amiRNA

SEQ ID NO: 1140 - RNA, 136 nt, Artificial Sequence; identical to SEQ ID NO: 462
  XD-14742_miR-155E_amiRNA

SEQ ID NO: 1141 - RNA, 138 nt, Artificial Sequence; identical to SEQ ID NO: 463
  XD-14786_miR-1-1_amiRNA

SEQ ID NO: 1142 - RNA, 136 nt, Artificial Sequence; identical to SEQ ID NO: 464
  XD-14786_miR-155E_amiRNA

SEQ ID NO: 1143 - RNA, 138 nt, Artificial Sequence; identical to SEQ ID NO: 465
  XD-14788_miR-1-1_amiRNA

SEQ ID NO: 1144 - RNA, 136 nt, Artificial Sequence; identical to SEQ ID NO: 466
  XD-14788_miR-155E_amiRNA

SEQ ID NO: 1145 - RNA, 138 nt, Artificial Sequence; identical to SEQ ID NO: 467
  XD-14890_miR-1-1_amiRNA

SEQ ID NO: 1146 - RNA, 136 nt, Artificial Sequence; identical to SEQ ID NO: 468
  XD-14890_miR-155E_amiRNA

SEQ ID NO: 1147 - RNA, 136 nt, Artificial Sequence; identical to SEQ ID NO: 469
  XD-14799_miR-155E_amiRNA

SEQ ID NO: 1148 - RNA, 138 nt, Artificial Sequence; identical to SEQ ID NO: 470
  XD-14799_miR-1-1_amiRNA

SEQ ID NO: 1149 - RNA, 138 nt, Artificial Sequence; identical to SEQ ID NO: 471
  XD-14887_miR-1-1_amiRNA

SEQ ID NO: 1150 - RNA, 136 nt, Artificial Sequence; identical to SEQ ID NO: 472
  XD-14887_miR-155E_amiRNA

SEQ ID NO: 1151 - RNA, 138 nt, Artificial Sequence; identical to SEQ ID NO: 473
  XD-14901_miR-1-1_amiRNA

SEQ ID NO: 1152 - RNA, 136 nt, Artificial Sequence; identical to SEQ ID NO: 474
  XD-14901_miR-155E_amiRNA

SEQ ID NO: 1153 - RNA, 138 nt, Artificial Sequence; identical to SEQ ID NO: 475
  XD-14756_miR-1-1_amiRNA

SEQ ID NO: 1154 - RNA, 136 nt, Artificial Sequence; identical to SEQ ID NO: 476
  XD-14756_miR-155E_amiRNA

SEQ ID NO: 1155 - RNA, 138 nt, Artificial Sequence; identical to SEQ ID NO: 477
  XD-14917_miR-1-1_amiRNA

SEQ ID NO: 1156 - RNA, 136 nt, Artificial Sequence; identical to SEQ ID NO: 478
  XD-14917_miR-155E_amiRNA

SEQ ID NO: 1157 - RNA, 136 nt, Artificial Sequence; identical to SEQ ID NO: 479
  XD-14846_miR-155E_amiRNA

SEQ ID NO: 1158 - RNA, 138 nt, Artificial Sequence; identical to SEQ ID NO: 480
  XD-14846_miR-1-1_amiRNA

SEQ ID NO: 1159 - RNA, 138 nt, Artificial Sequence; identical to SEQ ID NO: 481
  XD-14835_miR-1-1_amiRNA

SEQ ID NO: 1160 - RNA, 136 nt, Artificial Sequence; identical to SEQ ID NO: 482
  XD-14835_miR-155E_amiRNA

SEQ ID NO: 1161 - RNA, 136 nt, Artificial Sequence; identical to SEQ ID NO: 483
  XD-14819_miR-155E_amiRNA

SEQ ID NO: 1162 - RNA, 138 nt, Artificial Sequence; identical to SEQ ID NO: 484
  XD-14819_miR-1-1_amiRNA

SEQ ID NO: 1163 - RNA, 136 nt, Artificial Sequence; identical to SEQ ID NO: 485
  XD-14790_miR-155E_amiRNA

SEQ ID NO: 1164 - RNA, 138 nt, Artificial Sequence; identical to SEQ ID NO: 486
  XD-14790_miR-1-1_amiRNA

SEQ ID NO: 1165 - RNA, 138 nt, Artificial Sequence; identical to SEQ ID NO: 487
  XD-14800_miR-1-1_amiRNA

SEQ ID NO: 1166 - RNA, 136 nt, Artificial Sequence; identical to SEQ ID NO: 488
  XD-14800_miR-155E_amiRNA

SEQ ID NO: 1167 - RNA, 136 nt, Artificial Sequence; identical to SEQ ID NO: 489
  XD-14781_miR-155E_amiRNA

SEQ ID NO: 1168 - RNA, 138 nt, Artificial Sequence; identical to SEQ ID NO: 490
  XD-14781_miR-1-1_amiRNA

SEQ ID NO: 1169 - RNA, 20 nt, Artificial Sequence
  gATXN2_1 CRISPR Guide
aaguuacucaccguagacug

SEQ ID NO: 1170 - RNA, 20 nt, Artificial Sequence
  gATXN2_2 CRISPR Guide
aauagagaagucauauccug

SEQ ID NO: 1171 - RNA, 20 nt, Artificial Sequence
  gATXN2_3 CRISPR Guide
guauuggaaauacccccagu

SEQ ID NO: 1172 - RNA, 20 nt, Artificial Sequence
  gNTC CRISPR Guide
guagcgaacguguccggcgu

SEQ ID NO: 1173 - RNA, 20 nt, Artificial Sequence
  gATXN2_4 CRISPR Guide
gugaguucaccugcauccca

SEQ ID NO: 1174 - RNA, 20 nt, Artificial Sequence
  gATXN2_5 CRISPR Guide
gcuaucagugcuaaagugaa

SEQ ID NO: 1175 - RNA, 20 nt, Artificial Sequence
  gCD81 (cutting control that cuts the CD81 gene) CRISPR Guide
guuggcuuccugggcugcua

SEQ ID NO: 1176 - RNA, 22 nt, Artificial Sequence
  Guide Sequence
uaccacaacaaagucugaacau

SEQ ID NO: 1177 - RNA, 22 nt, Artificial Sequence
  Guide Sequence
uuaccacaacaaagucugaaca

SEQ ID NO: 1178 - RNA, 22 nt, Artificial Sequence
  Guide Sequence
uuguaccacaacaaagucugaa

SEQ ID NO: 1179 - RNA, 22 nt, Artificial Sequence
  Guide Sequence
acuguaccacaacaaagucuga

SEQ ID NO: 1180 - RNA, 22 nt, Artificial Sequence
  Guide Sequence
aacuguaccacaacaaagucug

SEQ ID NO: 1181 - RNA, 22 nt, Artificial Sequence
  Guide Sequence
aaacuguaccacaacaaagucu

SEQ ID NO: 1182 - RNA, 22 nt, Artificial Sequence
  Guide Sequence
uuaaacuguaccacaacaaagu

SEQ ID NO: 1183 - RNA, 22 nt, Artificial Sequence
  Guide Sequence
uugcuaacugguuugcccuugc

SEQ ID NO: 1184 - RNA, 22 nt, Artificial Sequence
  Guide Sequence
uggguugaaaucugaaguguga

SEQ ID NO: 1185 - RNA, 22 nt, Artificial Sequence
  Guide Sequence
ucggguugaaaucugaagugug

SEQ ID NO: 1186 - RNA, 22 nt, Artificial Sequence
  Guide Sequence
ugaugcaggacuagcaggcgua

SEQ ID NO: 1187 - RNA, 22 nt, Artificial Sequence
  Guide Sequence
ucgaugcaggacuagcaggcgu

SEQ ID NO: 1188 - RNA, 22 nt, Artificial Sequence
  Guide Sequence
uuucgaugcaggacuagcaggc

SEQ ID NO: 1189 - RNA, 22 nt, Artificial Sequence
  Guide Sequence
uguucgaugcaggacuagcagg

SEQ ID NO: 1190 - RNA, 22 nt, Artificial Sequence
  Guide Sequence
uuguucgaugcaggacuagcag

SEQ ID NO: 1191 - RNA, 22 nt, Artificial Sequence
  Guide Sequence
ucuguucgaugcaggacuagca

SEQ ID NO: 1192 - RNA, 22 nt, Artificial Sequence
  Guide Sequence
uucuguucgaugcaggacuagc

SEQ ID NO: 1193 - RNA, 22 nt, Artificial Sequence
  Guide Sequence
ucucuguucgaugcaggacuag

SEQ ID NO: 1194 - RNA, 22 nt, Artificial Sequence
  Guide Sequence
ugagagaaggaacguggguuga

SEQ ID NO: 1195 - RNA, 22 nt, Artificial Sequence
  Guide Sequence
uugagagaaggaacguggguug

SEQ ID NO: 1196 - RNA, 22 nt, Artificial Sequence
  Guide Sequence
ucugagagaaggaacguggguu

SEQ ID NO: 1197 - RNA, 22 nt, Artificial Sequence
  Guide Sequence
ugcugagagaaggaacgugggu

SEQ ID NO: 1198 - RNA, 22 nt, Artificial Sequence
  Guide Sequence
uggcugagagaaggaacguggg

SEQ ID NO: 1199 - RNA, 22 nt, Artificial Sequence
  Guide Sequence
uuggcugagagaaggaacgugg

SEQ ID NO: 1200 - RNA, 22 nt, Artificial Sequence
  Guide Sequence
uuuggcugagagaaggaacgug

SEQ ID NO: 1201 - RNA, 22 nt, Artificial Sequence
  Guide Sequence
uuuuggcugagagaaggaacgu

SEQ ID NO: 1202 - RNA, 22 nt, Artificial Sequence
  Guide Sequence
ucuuuggcugagagaaggaacg

SEQ ID NO: 1203 - RNA, 22 nt, Artificial Sequence
  Guide Sequence
ugcuuuggcugagagaaggaac

SEQ ID NO: 1204 - RNA, 22 nt, Artificial Sequence
  Guide Sequence
aggcuuuggcugagagaaggaa

SEQ ID NO: 1205 - RNA, 22 nt, Artificial Sequence
  Guide Sequence
aaggcuuuggcugagagaagga

SEQ ID NO: 1206 - RNA, 22 nt, Artificial Sequence
  Guide Sequence
uaaggcuuuggcugagagaagg

SEQ ID NO: 1207 - RNA, 22 nt, Artificial Sequence
  Guide Sequence
agaaggcuuuggcugagagaag

SEQ ID NO: 1208 - RNA, 22 nt, Artificial Sequence
  Guide Sequence
uagaaggcuuuggcugagagaa

SEQ ID NO: 1209 - RNA, 22 nt, Artificial Sequence
  Guide Sequence
uuagaaggcuuuggcugagaga

SEQ ID NO: 1210 - RNA, 22 nt, Artificial Sequence
  Guide Sequence
aguagaaggcuuuggcugagag

SEQ ID NO: 1211 - RNA, 22 nt, Artificial Sequence
  Guide Sequence
uaguagaaggcuuuggcugaga

SEQ ID NO: 1212 - RNA, 22 nt, Artificial Sequence
  Guide Sequence
uuaguagaaggcuuuggcugag

SEQ ID NO: 1213 - RNA, 22 nt, Artificial Sequence
  Guide Sequence
uguaguagaaggcuuuggcuga

SEQ ID NO: 1214 - RNA, 22 nt, Artificial Sequence
  Guide Sequence
ugguaguagaaggcuuuggcug

SEQ ID NO: 1215 - RNA, 22 nt, Artificial Sequence
  Guide Sequence
ugaacaaggggcugauuuggga

SEQ ID NO: 1216 - RNA, 22 nt, Artificial Sequence
  Guide Sequence
uugaacaaggggcugauuuggg

SEQ ID NO: 1217 - RNA, 22 nt, Artificial Sequence
  Guide Sequence
ucugaacaaggggcugauuugg

SEQ ID NO: 1218 - RNA, 22 nt, Artificial Sequence
  Guide Sequence
uguggcacaugcugaacaaggg

SEQ ID NO: 1219 - RNA, 22 nt, Artificial Sequence
  Guide Sequence
uugccaucauucuagcauuacc

SEQ ID NO: 1220 - RNA, 22 nt, Artificial Sequence
  Guide Sequence
uugcugggaaacuauucugugg

SEQ ID NO: 1221 - RNA, 22 nt, Artificial Sequence
  Guide Sequence
ucugcugggaaacuauucugug

SEQ ID NO: 1222 - RNA, 22 nt, Artificial Sequence
  Guide Sequence
ugcugcugggaaacuauucugu

SEQ ID NO: 1223 - RNA, 22 nt, Artificial Sequence
  Guide Sequence
ugaacgugagaaggauggaucg

SEQ ID NO: 1224 - RNA, 22 nt, Artificial Sequence
  Guide Sequence
uugaacgugagaaggauggauc

SEQ ID NO: 1225 - RNA, 22 nt, Artificial Sequence
  Guide Sequence
ucugaacgugagaaggauggau

SEQ ID NO: 1226 - RNA, 22 nt, Artificial Sequence
  Guide Sequence
aacuguuagcauuccuauugga

SEQ ID NO: 1227 - RNA, 22 nt, Artificial Sequence
  Guide Sequence
uaacuguuagcauuccuauugg

SEQ ID NO: 1228 - RNA, 22 nt, Artificial Sequence
  Guide Sequence
ugaacuguuagcauuccuauug

SEQ ID NO: 1229 - RNA, 22 nt, Artificial Sequence
  Guide Sequence
uugaacuguuagcauuccuauu

SEQ ID NO: 1230 - RNA, 22 nt, Artificial Sequence
  Guide Sequence
agugaacuguuagcauuccuau

SEQ ID NO: 1231 - RNA, 22 nt, Artificial Sequence
  Guide Sequence
aagugaacuguuagcauuccua

SEQ ID NO: 1232 - RNA, 22 nt, Artificial Sequence
  Guide Sequence
uaagugaacuguuagcauuccu

SEQ ID NO: 1233 - RNA, 22 nt, Artificial Sequence
  Guide Sequence
ucaagugaacuguuagcauucc

SEQ ID NO: 1234 - RNA, 22 nt, Artificial Sequence
  Guide Sequence
ugcaagugaacuguuagcauuc

SEQ ID NO: 1235 - RNA, 22 nt, Artificial Sequence
  Guide Sequence
uugcaagugaacuguuagcauu

SEQ ID NO: 1236 - RNA, 22 nt, Artificial Sequence
  Guide Sequence
acugcaagugaacuguuagcau

SEQ ID NO: 1237 - RNA, 22 nt, Artificial Sequence
  Guide Sequence
uacugcaagugaacuguuagca

SEQ ID NO: 1238 - RNA, 22 nt, Artificial Sequence
  Guide Sequence
ucacugcaagugaacuguuagc

SEQ ID NO: 1239 - RNA, 22 nt, Artificial Sequence
  Guide Sequence
uccacugcaagugaacuguuag

SEQ ID NO: 1240 - RNA, 22 nt, Artificial Sequence
  Guide Sequence
uuccacugcaagugaacuguua

SEQ ID NO: 1241 - RNA, 22 nt, Artificial Sequence
  Guide Sequence
uuuccacugcaagugaacuguu

SEQ ID NO: 1242 - RNA, 22 nt, Artificial Sequence
  Guide Sequence
ucuuccacugcaagugaacugu

SEQ ID NO: 1243 - RNA, 22 nt, Artificial Sequence
  Guide Sequence
aucuuccacugcaagugaacug

SEQ ID NO: 1244 - RNA, 22 nt, Artificial Sequence
  Guide Sequence
uaucuuccacugcaagugaacu

SEQ ID NO: 1245 - RNA, 22 nt, Artificial Sequence
  Guide Sequence
uggcaagcagagcugggguacc

SEQ ID NO: 1246 - RNA, 22 nt, Artificial Sequence
  Guide Sequence
ucggcaagcagagcugggguac

SEQ ID NO: 1247 - RNA, 22 nt, Artificial Sequence
  Guide Sequence
uucggcaagcagagcuggggua

SEQ ID NO: 1248 - RNA, 22 nt, Artificial Sequence
  Guide Sequence
uuucggcaagcagagcuggggu

SEQ ID NO: 1249 - RNA, 22 nt, Artificial Sequence
  Guide Sequence
uuuucggcaagcagagcugggg

SEQ ID NO: 1250 - RNA, 22 nt, Artificial Sequence
  Guide Sequence
aguuucggcaagcagagcuggg

SEQ ID NO: 1251 - RNA, 22 nt, Artificial Sequence
  Guide Sequence
uaguuucggcaagcagagcugg

SEQ ID NO: 1252 - RNA, 22 nt, Artificial Sequence
  Guide Sequence
ucaguuucggcaagcagagcug

SEQ ID NO: 1253 - RNA, 22 nt, Artificial Sequence
  Guide Sequence
uccaguuucggcaagcagagcu

SEQ ID NO: 1254 - RNA, 22 nt, Artificial Sequence
  Guide Sequence
uuccaguuucggcaagcagagc

SEQ ID NO: 1255 - RNA, 22 nt, Artificial Sequence
  Guide Sequence
uuuccaguuucggcaagcagag

SEQ ID NO: 1256 - RNA, 22 nt, Artificial Sequence
  Guide Sequence
acuuccaguuucggcaagcaga

SEQ ID NO: 1257 - RNA, 22 nt, Artificial Sequence
  Guide Sequence
aacuuccaguuucggcaagcag

SEQ ID NO: 1258 - RNA, 22 nt, Artificial Sequence
  Guide Sequence
uaacuuccaguuucggcaagca

SEQ ID NO: 1259 - RNA, 22 nt, Artificial Sequence
  Guide Sequence
auaacuuccaguuucggcaagc

SEQ ID NO: 1260 - RNA, 22 nt, Artificial Sequence
  Guide Sequence
aauaacuuccaguuucggcaag

SEQ ID NO: 1261 - RNA, 22 nt, Artificial Sequence
  Guide Sequence
aaauaacuuccaguuucggcaa

SEQ ID NO: 1262 - RNA, 22 nt, Artificial Sequence
  Guide Sequence
auaaauaacuuccaguuucggc

SEQ ID NO: 1263 - RNA, 22 nt, Artificial Sequence
  Guide Sequence
aauaaauaacuuccaguuucgg

SEQ ID NO: 1264 - RNA, 22 nt, Artificial Sequence
  Guide Sequence
aaauaaauaacuuccaguuucg

SEQ ID NO: 1265 - RNA, 22 nt, Artificial Sequence
  Guide Sequence
aaaauaaauaacuuccaguuuc

SEQ ID NO: 1266 - RNA, 22 nt, Artificial Sequence
  Guide Sequence
aaaaauaaauaacuuccaguuu

SEQ ID NO: 1267 - RNA, 22 nt, Artificial Sequence
  Guide Sequence
augacuuucaaggguuauuaaa

SEQ ID NO: 1268 - RNA, 22 nt, Artificial Sequence
  Guide Sequence
uaugacuuucaaggguuauuaa

SEQ ID NO: 1269 - RNA, 22 nt, Artificial Sequence
  Guide Sequence
ucaugacuuucaaggguuauua

SEQ ID NO: 1270 - RNA, 22 nt, Artificial Sequence
  Guide Sequence
uucaugacuuucaaggguuauu

SEQ ID NO: 1271 - RNA, 22 nt, Artificial Sequence
  Guide Sequence
uuucaugacuuucaaggguuau

SEQ ID NO: 1272 - RNA, 22 nt, Artificial Sequence
  Guide Sequence
uguucaugacuuucaaggguua

SEQ ID NO: 1273 - RNA, 22 nt, Artificial Sequence
  Guide Sequence
uuguucaugacuuucaaggguu

SEQ ID NO: 1274 - RNA, 22 nt, Artificial Sequence
  Guide Sequence
uguguucaugacuuucaagggu

SEQ ID NO: 1275 - RNA, 22 nt, Artificial Sequence
  Guide Sequence
auguguucaugacuuucaaggg

SEQ ID NO: 1276 - RNA, 22 nt, Artificial Sequence
  Guide Sequence
uauguguucaugacuuucaagg

SEQ ID NO: 1277 - RNA, 22 nt, Artificial Sequence
  Guide Sequence
ugauguguucaugacuuucaag

SEQ ID NO: 1278 - RNA, 22 nt, Artificial Sequence
  Guide Sequence
uugauguguucaugacuuucaa

SEQ ID NO: 1279 - RNA, 22 nt, Artificial Sequence
  Guide Sequence
ucugauguguucaugacuuuca

SEQ ID NO: 1280 - RNA, 22 nt, Artificial Sequence
  Guide Sequence
agcugauguguucaugacuuuc

SEQ ID NO: 1281 - RNA, 22 nt, Artificial Sequence
  Guide Sequence
uagcugauguguucaugacuuu

SEQ ID NO: 1282 - RNA, 22 nt, Artificial Sequence
  Guide Sequence
uuagcugauguguucaugacuu

SEQ ID NO: 1283 - RNA, 22 nt, Artificial Sequence
  Guide Sequence
ucuagcugauguguucaugacu

SEQ ID NO: 1284 - RNA, 22 nt, Artificial Sequence
  Guide Sequence
ugcuagcugauguguucaugac

SEQ ID NO: 1285 - RNA, 22 nt, Artificial Sequence
  Guide Sequence
uugcuagcugauguguucauga

SEQ ID NO: 1286 - RNA, 22 nt, Artificial Sequence
  Guide Sequence
uuugcuagcugauguguucaug

SEQ ID NO: 1287 - RNA, 22 nt, Artificial Sequence
  Guide Sequence
uuuugcuagcugauguguucau

SEQ ID NO: 1288 - RNA, 22 nt, Artificial Sequence
  Guide Sequence
ucuuuugcuagcugauguguuc

SEQ ID NO: 1289 - RNA, 22 nt, Artificial Sequence
  16_2_format_passenger
auguucagacccuguugugguu

SEQ ID NO: 1290 - RNA, 22 nt, Artificial Sequence
  16_2_format_passenger
uguucagacuccguugugguau

SEQ ID NO: 1291 - RNA, 22 nt, Artificial Sequence
  16_2_format_passenger
guucagacuucuuugugguacu

SEQ ID NO: 1292 - RNA, 22 nt, Artificial Sequence
  16_2_format_passenger
uucagacuuuucugugguacau

SEQ ID NO: 1293 - RNA, 22 nt, Artificial Sequence
  16_2_format_passenger
ucagacuuugccgugguacaga

SEQ ID NO: 1294 - RNA, 22 nt, Artificial Sequence
  16_2_format_passenger
cagacuuugucuugguacagua

SEQ ID NO: 1295 - RNA, 22 nt, Artificial Sequence
  16_2_format_passenger
agacuuuguuucgguacaguua

SEQ ID NO: 1296 - RNA, 22 nt, Artificial Sequence
  16_2_format_passenger
acuuuguuguuuuacaguuuau

SEQ ID NO: 1297 - RNA, 22 nt, Artificial Sequence
  16_2_format_passenger
gcaagggcaagacaguuagcau

SEQ ID NO: 1298 - RNA, 22 nt, Artificial Sequence
  16_2_format_passenger
ucacacuucauguuucaacccu

SEQ ID NO: 1299 - RNA, 22 nt, Artificial Sequence
  16_2_format_passenger
cacacuucaggcuucaacccgu

SEQ ID NO: 1300 - RNA, 22 nt, Artificial Sequence
  16_2_format_passenger
acacuucagaccucaacccgau

SEQ ID NO: 1301 - RNA, 22 nt, Artificial Sequence
  16_2_format_passenger
uacgccugcuguuccugcaucu

SEQ ID NO: 1302 - RNA, 22 nt, Artificial Sequence
  16_2_format_passenger
acgccugcuaucccugcaucgu

SEQ ID NO: 1303 - RNA, 22 nt, Artificial Sequence
  16_2_format_passenger
cgccugcuagcacugcaucgau

SEQ ID NO: 1304 - RNA, 22 nt, Artificial Sequence
  16_2_format_passenger
gccugcuaguaaugcaucgaau

SEQ ID NO: 1305 - RNA, 22 nt, Artificial Sequence
  16_2_format_passenger
ccugcuagucacgcaucgaacu

SEQ ID NO: 1306 - RNA, 22 nt, Artificial Sequence
  16_2_format_passenger
cugcuagucccucaucgaacau

SEQ ID NO: 1307 - RNA, 22 nt, Artificial Sequence
  16_2_format_passenger
ugcuaguccuuaaucgaacagu

SEQ ID NO: 1308 - RNA, 22 nt, Artificial Sequence
  16_2_format_passenger
gcuaguccugagucgaacagau

SEQ ID NO: 1309 - RNA, 22 nt, Artificial Sequence
  16_2_format_passenger
cuaguccugcgccgaacagagu

SEQ ID NO: 1310 - RNA, 22 nt, Artificial Sequence
  16_2_format_passenger
ucaacccacgccccuucucucu

SEQ ID NO: 1311 - RNA, 22 nt, Artificial Sequence
  16_2_format_passenger
caacccacgucacuucucucau

SEQ ID NO: 1312 - RNA, 22 nt, Artificial Sequence
  16_2_format_passenger
aacccacguuaauucucucagu

SEQ ID NO: 1313 - RNA, 22 nt, Artificial Sequence
  16_2_format_passenger
acccacguucacucucucagcu

SEQ ID NO: 1314 - RNA, 22 nt, Artificial Sequence
  16_2_format_passenger
cccacguucccccucucagccu

SEQ ID NO: 1315 - RNA, 22 nt, Artificial Sequence
  16_2_format_passenger
ccacguuccucaucucagccau

SEQ ID NO: 1316 - RNA, 22 nt, Artificial Sequence
  16_2_format_passenger
cacguuccuuaccucagccaau

SEQ ID NO: 1317 - RNA, 22 nt, Artificial Sequence
  16_2_format_passenger
acguuccuuccaucagccaaau

SEQ ID NO: 1318 - RNA, 22 nt, Artificial Sequence
  16_2_format_passenger
cguuccuucuaccagccaaagu

SEQ ID NO: 1319 - RNA, 22 nt, Artificial Sequence
  16_2_format_passenger
guuccuucuccaagccaaagcu

SEQ ID NO: 1320 - RNA, 22 nt, Artificial Sequence
  16_2_format_passenger
uuccuucucuaggccaaagcca

SEQ ID NO: 1321 - RNA, 22 nt, Artificial Sequence
  16_2_format_passenger
uccuucucucguccaaagccua

SEQ ID NO: 1322 - RNA, 22 nt, Artificial Sequence
  16_2_format_passenger
ccuucucucauacaaagccuuu

SEQ ID NO: 1323 - RNA, 22 nt, Artificial Sequence
  16_2_format_passenger
cuucucucagaaaaagccuuca

SEQ ID NO: 1324 - RNA, 22 nt, Artificial Sequence
  16_2_format_passenger
uucucucagcagaagccuucuu

SEQ ID NO: 1325 - RNA, 22 nt, Artificial Sequence
  16_2_format_passenger
ucucucagccggagccuucuau

SEQ ID NO: 1326 - RNA, 22 nt, Artificial Sequence
  16_2_format_passenger
cucucagccagggccuucuaca

SEQ ID NO: 1327 - RNA, 22 nt, Artificial Sequence
  16_2_format_passenger
ucucagccaaguccuucuacuu

SEQ ID NO: 1328 - RNA, 22 nt, Artificial Sequence
  16_2_format_passenger
cucagccaaauacuucuacuau

SEQ ID NO: 1329 - RNA, 22 nt, Artificial Sequence
  16_2_format_passenger
ucagccaaagaauucuacuacu

SEQ ID NO: 1330 - RNA, 22 nt, Artificial Sequence
  16_2_format_passenger
cagccaaagcacucuacuaccu

SEQ ID NO: 1331 - RNA, 22 nt, Artificial Sequence
  16_2_format_passenger
ucccaaaucauacccuuguucu

SEQ ID NO: 1332 - RNA, 22 nt, Artificial Sequence
  16_2_format_passenger
cccaaaucagaaccuuguucau

SEQ ID NO: 1333 - RNA, 22 nt, Artificial Sequence
  16_2_format_passenger
ccaaaucagcaacuuguucagu

SEQ ID NO: 1334 - RNA, 22 nt, Artificial Sequence
  16_2_format_passenger
cccuuguucauaaugugccacu

SEQ ID NO: 1335 - RNA, 22 nt, Artificial Sequence
  16_2_format_passenger
gguaaugcuaugaugauggcau

SEQ ID NO: 1336 - RNA, 22 nt, Artificial Sequence
  16_2_format_passenger
ccacagaauaucuucccagcau

SEQ ID NO: 1337 - RNA, 22 nt, Artificial Sequence
  16_2_format_passenger
cacagaauagccucccagcagu

SEQ ID NO: 1338 - RNA, 22 nt, Artificial Sequence
  16_2_format_passenger
acagaauagucccccagcagcu

SEQ ID NO: 1339 - RNA, 22 nt, Artificial Sequence
  16_2_format_passenger
cgauccaucccccucacguucu

SEQ ID NO: 1340 - RNA, 22 nt, Artificial Sequence
  16_2_format_passenger
gauccauccucaucacguucau

SEQ ID NO: 1341 - RNA, 22 nt, Artificial Sequence
  16_2_format_passenger
auccauccuuaccacguucagu

SEQ ID NO: 1342 - RNA, 22 nt, Artificial Sequence
  16_2_format_passenger
uccaauaggagcgcuaacagua

SEQ ID NO: 1343 - RNA, 22 nt, Artificial Sequence
  16_2_format_passenger
ccaauaggaacucuaacaguuu

SEQ ID NO: 1344 - RNA, 22 nt, Artificial Sequence
  16_2_format_passenger
caauaggaauuauaacaguucu

SEQ ID NO: 1345 - RNA, 22 nt, Artificial Sequence
  16_2_format_passenger
aauaggaaugacaacaguucau

SEQ ID NO: 1346 - RNA, 22 nt, Artificial Sequence
  16_2_format_passenger
auaggaaugccgacaguucaca

SEQ ID NO: 1347 - RNA, 22 nt, Artificial Sequence
  16_2_format_passenger
uaggaaugcuggcaguucacua

SEQ ID NO: 1348 - RNA, 22 nt, Artificial Sequence
  16_2_format_passenger
aggaaugcuagaaguucacuuu

SEQ ID NO: 1349 - RNA, 22 nt, Artificial Sequence
  16_2_format_passenger
ggaaugcuaaagguucacuugu

SEQ ID NO: 1350 - RNA, 22 nt, Artificial Sequence
  16_2_format_passenger
gaaugcuaacguuucacuugcu

SEQ ID NO: 1351 - RNA, 22 nt, Artificial Sequence
  16_2_format_passenger
aaugcuaacaucucacuugcau

SEQ ID NO: 1352 - RNA, 22 nt, Artificial Sequence
  16_2_format_passenger
augcuaacagcccacuugcaga

SEQ ID NO: 1353 - RNA, 22 nt, Artificial Sequence
  16_2_format_passenger
ugcuaacagucaacuugcaguu

SEQ ID NO: 1354 - RNA, 22 nt, Artificial Sequence
  16_2_format_passenger
gcuaacaguuagcuugcagugu

SEQ ID NO: 1355 - RNA, 22 nt, Artificial Sequence
  16_2_format_passenger
cuaacaguucgauugcaguggu

SEQ ID NO: 1356 - RNA, 22 nt, Artificial Sequence
  16_2_format_passenger
uaacaguucaacugcaguggau

SEQ ID NO: 1357 - RNA, 22 nt, Artificial Sequence
  16_2_format_passenger
aacaguucacccgcaguggaau

SEQ ID NO: 1358 - RNA, 22 nt, Artificial Sequence
  16_2_format_passenger
acaguucacucucaguggaagu

SEQ ID NO: 1359 - RNA, 22 nt, Artificial Sequence
  16_2_format_passenger
caguucacuuuaaguggaagaa

SEQ ID NO: 1360 - RNA, 22 nt, Artificial Sequence
  16_2_format_passenger
aguucacuugagguggaagauu

SEQ ID NO: 1361 - RNA, 22 nt, Artificial Sequence
  16_2_format_passenger
gguaccccagaccugcuugccu

SEQ ID NO: 1362 - RNA, 22 nt, Artificial Sequence
  16_2_format_passenger
guaccccagccaugcuugccgu

SEQ ID NO: 1363 - RNA, 22 nt, Artificial Sequence
  16_2_format_passenger
uaccccagcuacgcuugccgau

SEQ ID NO: 1364 - RNA, 22 nt, Artificial Sequence
  16_2_format_passenger
accccagcuccucuugccgaau

SEQ ID NO: 1365 - RNA, 22 nt, Artificial Sequence
  16_2_format_passenger
ccccagcucuuauugccgaaau

SEQ ID NO: 1366 - RNA, 22 nt, Artificial Sequence
  16_2_format_passenger
cccagcucugacugccgaaaca

SEQ ID NO: 1367 - RNA, 22 nt, Artificial Sequence
  16_2_format_passenger
ccagcucugcccgccgaaacuu

SEQ ID NO: 1368 - RNA, 22 nt, Artificial Sequence
  16_2_format_passenger
cagcucugcucuccgaaacugu

SEQ ID NO: 1369 - RNA, 22 nt, Artificial Sequence
  16_2_format_passenger
agcucugcuuuacgaaacuggu

SEQ ID NO: 1370 - RNA, 22 nt, Artificial Sequence
  16_2_format_passenger
gcucugcuugaagaaacuggau

SEQ ID NO: 1371 - RNA, 22 nt, Artificial Sequence
  16_2_format_passenger
cucugcuugcauaaacuggaau

SEQ ID NO: 1372 - RNA, 22 nt, Artificial Sequence
  16_2_format_passenger
ucugcuugccugaacuggaaga

SEQ ID NO: 1373 - RNA, 22 nt, Artificial Sequence
  16_2_format_passenger
cugcuugccgggacuggaagua

SEQ ID NO: 1374 - RNA, 22 nt, Artificial Sequence
  16_2_format_passenger
ugcuugccgaggcuggaaguuu

SEQ ID NO: 1375 - RNA, 22 nt, Artificial Sequence
  16_2_format_passenger
gcuugccgaagauggaaguuaa

SEQ ID NO: 1376 - RNA, 22 nt, Artificial Sequence
  16_2_format_passenger
cuugccgaaaacggaaguuaua

SEQ ID NO: 1377 - RNA, 22 nt, Artificial Sequence
  16_2_format_passenger
uugccgaaaccugaaguuauua

SEQ ID NO: 1378 - RNA, 22 nt, Artificial Sequence
  16_2_format_passenger
gccgaaacugugaguuauuuaa

SEQ ID NO: 1379 - RNA, 22 nt, Artificial Sequence
  16_2_format_passenger
ccgaaacuggggguuauuuaua

SEQ ID NO: 1380 - RNA, 22 nt, Artificial Sequence
  16_2_format_passenger
cgaaacuggaguuuauuuauua

SEQ ID NO: 1381 - RNA, 22 nt, Artificial Sequence
  16_2_format_passenger
gaaacuggaaucuauuuauuua

SEQ ID NO: 1382 - RNA, 22 nt, Artificial Sequence
  16_2_format_passenger
aaacuggaagccauuuauuuua

SEQ ID NO: 1383 - RNA, 22 nt, Artificial Sequence
  16_2_format_passenger
uuuaauaaccacugaaagucaa

SEQ ID NO: 1384 - RNA, 22 nt, Artificial Sequence
  16_2_format_passenger
uuaauaacccccgaaagucauu

SEQ ID NO: 1385 - RNA, 22 nt, Artificial Sequence
  16_2_format_passenger
uaauaacccucuaaagucaugu

SEQ ID NO: 1386 - RNA, 22 nt, Artificial Sequence
  16_2_format_passenger
aauaacccuuugaagucaugau

SEQ ID NO: 1387 - RNA, 22 nt, Artificial Sequence
  16_2_format_passenger
auaacccuugggagucaugaau

SEQ ID NO: 1388 - RNA, 22 nt, Artificial Sequence
  16_2_format_passenger
uaacccuugagggucaugaacu

SEQ ID NO: 1389 - RNA, 22 nt, Artificial Sequence
  16_2_format_passenger
aacccuugaaguucaugaacau

SEQ ID NO: 1390 - RNA, 22 nt, Artificial Sequence
  16_2_format_passenger
acccuugaaauccaugaacacu

SEQ ID NO: 1391 - RNA, 22 nt, Artificial Sequence
  16_2_format_passenger
cccuugaaagcaaugaacacaa

SEQ ID NO: 1392 - RNA, 22 nt, Artificial Sequence
  16_2_format_passenger
ccuugaaaguagugaacacauu

SEQ ID NO: 1393 - RNA, 22 nt, Artificial Sequence
  16_2_format_passenger
cuugaaagucgcgaacacaucu

SEQ ID NO: 1394 - RNA, 22 nt, Artificial Sequence
  16_2_format_passenger
uugaaagucacuaacacaucau

SEQ ID NO: 1395 - RNA, 22 nt, Artificial Sequence
  16_2_format_passenger
ugaaagucauugacacaucagu

SEQ ID NO: 1396 - RNA, 22 nt, Artificial Sequence
  16_2_format_passenger
gaaagucaugggcacaucagca

SEQ ID NO: 1397 - RNA, 22 nt, Artificial Sequence
  16_2_format_passenger
aaagucaugagaacaucagcuu

SEQ ID NO: 1398 - RNA, 22 nt, Artificial Sequence
  16_2_format_passenger
aagucaugaaagcaucagcuau

SEQ ID NO: 1399 - RNA, 22 nt, Artificial Sequence
  16_2_format_passenger
agucaugaacgaaucagcuagu

SEQ ID NO: 1400 - RNA, 22 nt, Artificial Sequence
  16_2_format_passenger
gucaugaacaagucagcuagcu

SEQ ID NO: 1401 - RNA, 22 nt, Artificial Sequence
  16_2_format_passenger
ucaugaacacgccagcuagcau

SEQ ID NO: 1402 - RNA, 22 nt, Artificial Sequence
  16_2_format_passenger
caugaacacacaagcuagcaau

SEQ ID NO: 1403 - RNA, 22 nt, Artificial Sequence
  16_2_format_passenger
augaacacauaggcuagcaaau

SEQ ID NO: 1404 - RNA, 22 nt, Artificial Sequence
  16_2_format_passenger
gaacacaucauauagcaaaagu

SEQ ID NO: 1405 - RNA, 119 nt, Artificial Sequence
  Artificial miRNA
accggacauacuuguuccacucuaccacaacaaagucugaacauuagugaaauauauauuaaaauguucagacccuguugugguuuagugugacagggauacagcaacuauuuuaucaa

SEQ ID NO: 1406 - RNA, 119 nt, Artificial Sequence
  Artificial miRNA
accggacauacuuguuccacucuuaccacaacaaagucugaacauagugaaauauauauuaaauguucagacuccguugugguauuagugugacagggauacagcaacuauuuuaucaa

SEQ ID NO: 1407 - RNA, 119 nt, Artificial Sequence
  Artificial miRNA
accggacauacuuguuccacucuguaccacaacaaagucugaacuagugaaauauauauuaaaguucagacuucuuugugguacuuagugugacagggauacagcaacuauuuuaucaa

SEQ ID NO: 1408 - RNA, 119 nt, Artificial Sequence
  Artificial miRNA
accggacauacuuguuccacucuuguaccacaacaaagucugaauagugaaauauauauuaaauucagacuuuucugugguacauuagugugacagggauacagcaacuauuuuaucaa

SEQ ID NO: 1409 - RNA, 119 nt, Artificial Sequence
  Artificial miRNA
accggacauacuuguuccacucacuguaccacaacaaagucugauagugaaauauauauuaaaucagacuuugccgugguacagauagugugacagggauacagcaacuauuuuaucaa

SEQ ID NO: 1410 - RNA, 119 nt, Artificial Sequence
  Artificial miRNA
accggacauacuuguuccacucaacuguaccacaacaaagucuguagugaaauauauauuaaacagacuuugucuugguacaguauagugugacagggauacagcaacuauuuuaucaa

SEQ ID NO: 1411 - RNA, 119 nt, Artificial Sequence
  Artificial miRNA
accggacauacuuguuccacucaaacuguaccacaacaaagucuuagugaaauauauauuaaaagacuuuguuucgguacaguuauagugugacagggauacagcaacuauuuuaucaa

SEQ ID NO: 1412 - RNA, 119 nt, Artificial Sequence
  Artificial miRNA
accggacauacuuguuccacucuuaaacuguaccacaacaaaguuagugaaauauauauuaaaacuuuguuguuuuacaguuuauuagugugacagggauacagcaacuauuuuaucaa

SEQ ID NO: 1413 - RNA, 119 nt, Artificial Sequence
  Artificial miRNA
accggacauacuuguuccacucuugcuaacugguuugcccuugcuagugaaauauauauuaaagcaagggcaagacaguuagcauuagugugacagggauacagcaacuauuuuaucaa

SEQ ID NO: 1414 - RNA, 119 nt, Artificial Sequence
  Artificial miRNA
accggacauacuuguuccacucuggguugaaaucugaagugugauagugaaauauauauuaaaucacacuucauguuucaacccuuagugugacagggauacagcaacuauuuuaucaa

SEQ ID NO: 1415 - RNA, 119 nt, Artificial Sequence
  Artificial miRNA
accggacauacuuguuccacucucggguugaaaucugaaguguguagugaaauauauauuaaacacacuucaggcuucaacccguuagugugacagggauacagcaacuauuuuaucaa

SEQ ID NO: 1416 - RNA, 119 nt, Artificial Sequence
  Artificial miRNA
accggacauacuuguuccacucuucggguugaaaucugaaguguuagugaaauauauauuaaaacacuucagaccucaacccgauuagugugacagggauacagcaacuauuuuaucaa

SEQ ID NO: 1417 - RNA, 119 nt, Artificial Sequence
  Artificial miRNA
accggacauacuuguuccacucugaugcaggacuagcaggcguauagugaaauauauauuaaauacgccugcuguuccugcaucuuagugugacagggauacagcaacuauuuuaucaa

SEQ ID NO: 1418 - RNA, 119 nt, Artificial Sequence
  Artificial miRNA
accggacauacuuguuccacucucgaugcaggacuagcaggcguuagugaaauauauauuaaaacgccugcuaucccugcaucguuagugugacagggauacagcaacuauuuuaucaa

SEQ ID NO: 1419 - RNA, 119 nt, Artificial Sequence
  Artificial miRNA
accggacauacuuguuccacucuucgaugcaggacuagcaggcguagugaaauauauauuaaacgccugcuagcacugcaucgauuagugugacagggauacagcaacuauuuuaucaa

SEQ ID NO: 1420 - RNA, 119 nt, Artificial Sequence
  Artificial miRNA
accggacauacuuguuccacucuuucgaugcaggacuagcaggcuagugaaauauauauuaaagccugcuaguaaugcaucgaauuagugugacagggauacagcaacuauuuuaucaa

SEQ ID NO: 1421 - RNA, 119 nt, Artificial Sequence
  Artificial miRNA
accggacauacuuguuccacucuguucgaugcaggacuagcagguagugaaauauauauuaaaccugcuagucacgcaucgaacuuagugugacagggauacagcaacuauuuuaucaa

SEQ ID NO: 1422 - RNA, 119 nt, Artificial Sequence
  Artificial miRNA
accggacauacuuguuccacucuuguucgaugcaggacuagcaguagugaaauauauauuaaacugcuagucccucaucgaacauuagugugacagggauacagcaacuauuuuaucaa

SEQ ID NO: 1423 - RNA, 119 nt, Artificial Sequence
  Artificial miRNA
accggacauacuuguuccacucucuguucgaugcaggacuagcauagugaaauauauauuaaaugcuaguccuuaaucgaacaguuagugugacagggauacagcaacuauuuuaucaa

SEQ ID NO: 1424 - RNA, 119 nt, Artificial Sequence
  Artificial miRNA
accggacauacuuguuccacucuucuguucgaugcaggacuagcuagugaaauauauauuaaagcuaguccugagucgaacagauuagugugacagggauacagcaacuauuuuaucaa

SEQ ID NO: 1425 - RNA, 119 nt, Artificial Sequence
  Artificial miRNA
accggacauacuuguuccacucucucuguucgaugcaggacuaguagugaaauauauauuaaacuaguccugcgccgaacagaguuagugugacagggauacagcaacuauuuuaucaa

SEQ ID NO: 1426 - RNA, 119 nt, Artificial Sequence
  Artificial miRNA
accggacauacuuguuccacucugagagaaggaacguggguugauagugaaauauauauuaaaucaacccacgccccuucucucuuagugugacagggauacagcaacuauuuuaucaa

SEQ ID NO: 1427 - RNA, 119 nt, Artificial Sequence
  Artificial miRNA
accggacauacuuguuccacucuugagagaaggaacguggguuguagugaaauauauauuaaacaacccacgucacuucucucauuagugugacagggauacagcaacuauuuuaucaa

SEQ ID NO: 1428 - RNA, 119 nt, Artificial Sequence
  Artificial miRNA
accggacauacuuguuccacucucugagagaaggaacguggguuuagugaaauauauauuaaaaacccacguuaauucucucaguuagugugacagggauacagcaacuauuuuaucaa

SEQ ID NO: 1429 - RNA, 119 nt, Artificial Sequence
  Artificial miRNA
accggacauacuuguuccacucugcugagagaaggaacguggguuagugaaauauauauuaaaacccacguucacucucucagcuuagugugacagggauacagcaacuauuuuaucaa

SEQ ID NO: 1430 - RNA, 119 nt, Artificial Sequence
  Artificial miRNA
accggacauacuuguuccacucuggcugagagaaggaacguggguagugaaauauauauuaaacccacguucccccucucagccuuagugugacagggauacagcaacuauuuuaucaa

SEQ ID NO: 1431 - RNA, 119 nt, Artificial Sequence
  Artificial miRNA
accggacauacuuguuccacucuuggcugagagaaggaacgugguagugaaauauauauuaaaccacguuccucaucucagccauuagugugacagggauacagcaacuauuuuaucaa

SEQ ID NO: 1432 - RNA, 119 nt, Artificial Sequence
  Artificial miRNA
accggacauacuuguuccacucuuuggcugagagaaggaacguguagugaaauauauauuaaacacguuccuuaccucagccaauuagugugacagggauacagcaacuauuuuaucaa

SEQ ID NO: 1433 - RNA, 119 nt, Artificial Sequence
  Artificial miRNA
accggacauacuuguuccacucuuuuggcugagagaaggaacguuagugaaauauauauuaaaacguuccuuccaucagccaaauuagugugacagggauacagcaacuauuuuaucaa

SEQ ID NO: 1434 - RNA, 119 nt, Artificial Sequence
  Artificial miRNA
accggacauacuuguuccacucucuuuggcugagagaaggaacguagugaaauauauauuaaacguuccuucuaccagccaaaguuagugugacagggauacagcaacuauuuuaucaa

SEQ ID NO: 1435 - RNA, 119 nt, Artificial Sequence
  Artificial miRNA
accggacauacuuguuccacucugcuuuggcugagagaaggaacuagugaaauauauauuaaaguuccuucuccaagccaaagcuuagugugacagggauacagcaacuauuuuaucaa

SEQ ID NO: 1436 - RNA, 119 nt, Artificial Sequence
  Artificial miRNA
accggacauacuuguuccacucaggcuuuggcugagagaaggaauagugaaauauauauuaaauuccuucucuaggccaaagccauagugugacagggauacagcaacuauuuuaucaa

SEQ ID NO: 1437 - RNA, 119 nt, Artificial Sequence
  Artificial miRNA
accggacauacuuguuccacucaaggcuuuggcugagagaaggauagugaaauauauauuaaauccuucucucguccaaagccuauagugugacagggauacagcaacuauuuuaucaa

SEQ ID NO: 1438 - RNA, 119 nt, Artificial Sequence
  Artificial miRNA
accggacauacuuguuccacucuaaggcuuuggcugagagaagguagugaaauauauauuaaaccuucucucauacaaagccuuuuagugugacagggauacagcaacuauuuuaucaa

SEQ ID NO: 1439 - RNA, 119 nt, Artificial Sequence
  Artificial miRNA
accggacauacuuguuccacucagaaggcuuuggcugagagaaguagugaaauauauauuaaacuucucucagaaaaagccuucauagugugacagggauacagcaacuauuuuaucaa

SEQ ID NO: 1440 - RNA, 119 nt, Artificial Sequence
  Artificial miRNA
accggacauacuuguuccacucuagaaggcuuuggcugagagaauagugaaauauauauuaaauucucucagcagaagccuucuuuagugugacagggauacagcaacuauuuuaucaa

SEQ ID NO: 1441 - RNA, 119 nt, Artificial Sequence
  Artificial miRNA
accggacauacuuguuccacucuuagaaggcuuuggcugagagauagugaaauauauauuaaaucucucagccggagccuucuauuagugugacagggauacagcaacuauuuuaucaa

SEQ ID NO: 1442 - RNA, 119 nt, Artificial Sequence
  Artificial miRNA
accggacauacuuguuccacucaguagaaggcuuuggcugagaguagugaaauauauauuaaacucucagccagggccuucuacauagugugacagggauacagcaacuauuuuaucaa

SEQ ID NO: 1443 - RNA, 119 nt, Artificial Sequence
  Artificial miRNA
accggacauacuuguuccacucuaguagaaggcuuuggcugagauagugaaauauauauuaaaucucagccaaguccuucuacuuuagugugacagggauacagcaacuauuuuaucaa

SEQ ID NO: 1444 - RNA, 119 nt, Artificial Sequence
  Artificial miRNA
accggacauacuuguuccacucuuaguagaaggcuuuggcugaguagugaaauauauauuaaacucagccaaauacuucuacuauuagugugacagggauacagcaacuauuuuaucaa

SEQ ID NO: 1445 - RNA, 119 nt, Artificial Sequence
  Artificial miRNA
accggacauacuuguuccacucuguaguagaaggcuuuggcugauagugaaauauauauuaaaucagccaaagaauucuacuacuuagugugacagggauacagcaacuauuuuaucaa

SEQ ID NO: 1446 - RNA, 119 nt, Artificial Sequence
  Artificial miRNA
accggacauacuuguuccacucugguaguagaaggcuuuggcuguagugaaauauauauuaaacagccaaagcacucuacuaccuuagugugacagggauacagcaacuauuuuaucaa

SEQ ID NO: 1447 - RNA, 119 nt, Artificial Sequence
  Artificial miRNA
accggacauacuuguuccacucugaacaaggggcugauuugggauagugaaauauauauuaaaucccaaaucauacccuuguucuuagugugacagggauacagcaacuauuuuaucaa

SEQ ID NO: 1448 - RNA, 119 nt, Artificial Sequence
  Artificial miRNA
accggacauacuuguuccacucuugaacaaggggcugauuuggguagugaaauauauauuaaacccaaaucagaaccuuguucauuagugugacagggauacagcaacuauuuuaucaa

SEQ ID NO: 1449 - RNA, 119 nt, Artificial Sequence
  Artificial miRNA
accggacauacuuguuccacucucugaacaaggggcugauuugguagugaaauauauauuaaaccaaaucagcaacuuguucaguuagugugacagggauacagcaacuauuuuaucaa

SEQ ID NO: 1450 - RNA, 119 nt, Artificial Sequence
  Artificial miRNA
accggacauacuuguuccacucuguggcacaugcugaacaaggguagugaaauauauauuaaacccuuguucauaaugugccacuuagugugacagggauacagcaacuauuuuaucaa

SEQ ID NO: 1451 - RNA, 119 nt, Artificial Sequence
  Artificial miRNA
accggacauacuuguuccacucuugccaucauucuagcauuaccuagugaaauauauauuaaagguaaugcuaugaugauggcauuagugugacagggauacagcaacuauuuuaucaa

SEQ ID NO: 1452 - RNA, 119 nt, Artificial Sequence
  Artificial miRNA
accggacauacuuguuccacucuugcugggaaacuauucugugguagugaaauauauauuaaaccacagaauaucuucccagcauuagugugacagggauacagcaacuauuuuaucaa

SEQ ID NO: 1453 - RNA, 119 nt, Artificial Sequence
  Artificial miRNA
accggacauacuuguuccacucucugcugggaaacuauucuguguagugaaauauauauuaaacacagaauagccucccagcaguuagugugacagggauacagcaacuauuuuaucaa

SEQ ID NO: 1454 - RNA, 119 nt, Artificial Sequence
  Artificial miRNA
accggacauacuuguuccacucugcugcugggaaacuauucuguuagugaaauauauauuaaaacagaauagucccccagcagcuuagugugacagggauacagcaacuauuuuaucaa

SEQ ID NO: 1455 - RNA, 119 nt, Artificial Sequence
  Artificial miRNA
accggacauacuuguuccacucugaacgugagaaggauggaucguagugaaauauauauuaaacgauccaucccccucacguucuuagugugacagggauacagcaacuauuuuaucaa

SEQ ID NO: 1456 - RNA, 119 nt, Artificial Sequence
  Artificial miRNA
accggacauacuuguuccacucuugaacgugagaaggauggaucuagugaaauauauauuaaagauccauccucaucacguucauuagugugacagggauacagcaacuauuuuaucaa

SEQ ID NO: 1457 - RNA, 119 nt, Artificial Sequence
  Artificial miRNA
accggacauacuuguuccacucucugaacgugagaaggauggauuagugaaauauauauuaaaauccauccuuaccacguucaguuagugugacagggauacagcaacuauuuuaucaa

SEQ ID NO: 1458 - RNA, 119 nt, Artificial Sequence
  Artificial miRNA
accggacauacuuguuccacucaacuguuagcauuccuauuggauagugaaauauauauuaaauccaauaggagcgcuaacaguauagugugacagggauacagcaacuauuuuaucaa

SEQ ID NO: 1459 - RNA, 119 nt, Artificial Sequence
  Artificial miRNA
accggacauacuuguuccacucuaacuguuagcauuccuauugguagugaaauauauauuaaaccaauaggaacucuaacaguuuuagugugacagggauacagcaacuauuuuaucaa

SEQ ID NO: 1460 - RNA, 119 nt, Artificial Sequence
  Artificial miRNA
accggacauacuuguuccacucugaacuguuagcauuccuauuguagugaaauauauauuaaacaauaggaauuauaacaguucuuagugugacagggauacagcaacuauuuuaucaa

SEQ ID NO: 1461 - RNA, 119 nt, Artificial Sequence
  Artificial miRNA
accggacauacuuguuccacucuugaacuguuagcauuccuauuuagugaaauauauauuaaaaauaggaaugacaacaguucauuagugugacagggauacagcaacuauuuuaucaa

SEQ ID NO: 1462 - RNA, 119 nt, Artificial Sequence
  Artificial miRNA
accggacauacuuguuccacucagugaacuguuagcauuccuauuagugaaauauauauuaaaauaggaaugccgacaguucacauagugugacagggauacagcaacuauuuuaucaa

SEQ ID NO: 1463 - RNA, 119 nt, Artificial Sequence
  Artificial miRNA
accggacauacuuguuccacucaagugaacuguuagcauuccuauagugaaauauauauuaaauaggaaugcuggcaguucacuauagugugacagggauacagcaacuauuuuaucaa

SEQ ID NO: 1464 - RNA, 119 nt, Artificial Sequence
  Artificial miRNA
accggacauacuuguuccacucuaagugaacuguuagcauuccuuagugaaauauauauuaaaaggaaugcuagaaguucacuuuuagugugacagggauacagcaacuauuuuaucaa

SEQ ID NO: 1465 - RNA, 119 nt, Artificial Sequence
  Artificial miRNA
accggacauacuuguuccacucucaagugaacuguuagcauuccuagugaaauauauauuaaaggaaugcuaaagguucacuuguuagugugacagggauacagcaacuauuuuaucaa

SEQ ID NO: 1466 - RNA, 119 nt, Artificial Sequence
  Artificial miRNA
accggacauacuuguuccacucugcaagugaacuguuagcauucuagugaaauauauauuaaagaaugcuaacguuucacuugcuuagugugacagggauacagcaacuauuuuaucaa

SEQ ID NO: 1467 - RNA, 119 nt, Artificial Sequence
  Artificial miRNA
accggacauacuuguuccacucuugcaagugaacuguuagcauuuagugaaauauauauuaaaaaugcuaacaucucacuugcauuagugugacagggauacagcaacuauuuuaucaa

SEQ ID NO: 1468 - RNA, 119 nt, Artificial Sequence
  Artificial miRNA
accggacauacuuguuccacucacugcaagugaacuguuagcauuagugaaauauauauuaaaaugcuaacagcccacuugcagauagugugacagggauacagcaacuauuuuaucaa

SEQ ID NO: 1469 - RNA, 119 nt, Artificial Sequence
  Artificial miRNA
accggacauacuuguuccacucuacugcaagugaacuguuagcauagugaaauauauauuaaaugcuaacagucaacuugcaguuuagugugacagggauacagcaacuauuuuaucaa

SEQ ID NO: 1470 - RNA, 119 nt, Artificial Sequence
  Artificial miRNA
accggacauacuuguuccacucucacugcaagugaacuguuagcuagugaaauauauauuaaagcuaacaguuagcuugcaguguuagugugacagggauacagcaacuauuuuaucaa

SEQ ID NO: 1471 - RNA, 119 nt, Artificial Sequence
  Artificial miRNA
accggacauacuuguuccacucuccacugcaagugaacuguuaguagugaaauauauauuaaacuaacaguucgauugcagugguuagugugacagggauacagcaacuauuuuaucaa

SEQ ID NO: 1472 - RNA, 119 nt, Artificial Sequence
  Artificial miRNA
accggacauacuuguuccacucuuccacugcaagugaacuguuauagugaaauauauauuaaauaacaguucaacugcaguggauuagugugacagggauacagcaacuauuuuaucaa

SEQ ID NO: 1473 - RNA, 119 nt, Artificial Sequence
  Artificial miRNA
accggacauacuuguuccacucuuuccacugcaagugaacuguuuagugaaauauauauuaaaaacaguucacccgcaguggaauuagugugacagggauacagcaacuauuuuaucaa

SEQ ID NO: 1474 - RNA, 119 nt, Artificial Sequence
  Artificial miRNA
accggacauacuuguuccacucucuuccacugcaagugaacuguuagugaaauauauauuaaaacaguucacucucaguggaaguuagugugacagggauacagcaacuauuuuaucaa

SEQ ID NO: 1475 - RNA, 119 nt, Artificial Sequence
  Artificial miRNA
accggacauacuuguuccacucaucuuccacugcaagugaacuguagugaaauauauauuaaacaguucacuuuaaguggaagaauagugugacagggauacagcaacuauuuuaucaa

SEQ ID NO: 1476 - RNA, 119 nt, Artificial Sequence
  Artificial miRNA
accggacauacuuguuccacucuaucuuccacugcaagugaacuuagugaaauauauauuaaaaguucacuugagguggaagauuuagugugacagggauacagcaacuauuuuaucaa

SEQ ID NO: 1477 - RNA, 119 nt, Artificial Sequence
  Artificial miRNA
accggacauacuuguuccacucuggcaagcagagcugggguaccuagugaaauauauauuaaagguaccccagaccugcuugccuuagugugacagggauacagcaacuauuuuaucaa

SEQ ID NO: 1478 - RNA, 119 nt, Artificial Sequence
  Artificial miRNA
accggacauacuuguuccacucucggcaagcagagcugggguacuagugaaauauauauuaaaguaccccagccaugcuugccguuagugugacagggauacagcaacuauuuuaucaa

SEQ ID NO: 1479 - RNA, 119 nt, Artificial Sequence
  Artificial miRNA
accggacauacuuguuccacucuucggcaagcagagcugggguauagugaaauauauauuaaauaccccagcuacgcuugccgauuagugugacagggauacagcaacuauuuuaucaa

SEQ ID NO: 1480 - RNA, 119 nt, Artificial Sequence
  Artificial miRNA
accggacauacuuguuccacucuuucggcaagcagagcugggguuagugaaauauauauuaaaaccccagcuccucuugccgaauuagugugacagggauacagcaacuauuuuaucaa

SEQ ID NO: 1481 - RNA, 119 nt, Artificial Sequence
  Artificial miRNA
accggacauacuuguuccacucuuuucggcaagcagagcugggguagugaaauauauauuaaaccccagcucuuauugccgaaauuagugugacagggauacagcaacuauuuuaucaa

SEQ ID NO: 1482 - RNA, 119 nt, Artificial Sequence
  Artificial miRNA
accggacauacuuguuccacucaguuucggcaagcagagcuggguagugaaauauauauuaaacccagcucugacugccgaaacauagugugacagggauacagcaacuauuuuaucaa

SEQ ID NO: 1483 - RNA, 119 nt, Artificial Sequence
  Artificial miRNA
accggacauacuuguuccacucuaguuucggcaagcagagcugguagugaaauauauauuaaaccagcucugcccgccgaaacuuuagugugacagggauacagcaacuauuuuaucaa

SEQ ID NO: 1484 - RNA, 119 nt, Artificial Sequence
  Artificial miRNA
accggacauacuuguuccacucucaguuucggcaagcagagcuguagugaaauauauauuaaacagcucugcucuccgaaacuguuagugugacagggauacagcaacuauuuuaucaa

SEQ ID NO: 1485 - RNA, 119 nt, Artificial Sequence
  Artificial miRNA
accggacauacuuguuccacucuccaguuucggcaagcagagcuuagugaaauauauauuaaaagcucugcuuuacgaaacugguuagugugacagggauacagcaacuauuuuaucaa

SEQ ID NO: 1486 - RNA, 119 nt, Artificial Sequence
  Artificial miRNA
accggacauacuuguuccacucuuccaguuucggcaagcagagcuagugaaauauauauuaaagcucugcuugaagaaacuggauuagugugacagggauacagcaacuauuuuaucaa

SEQ ID NO: 1487 - RNA, 119 nt, Artificial Sequence
  Artificial miRNA
accggacauacuuguuccacucuuuccaguuucggcaagcagaguagugaaauauauauuaaacucugcuugcauaaacuggaauuagugugacagggauacagcaacuauuuuaucaa

SEQ ID NO: 1488 - RNA, 119 nt, Artificial Sequence
  Artificial miRNA
accggacauacuuguuccacucacuuccaguuucggcaagcagauagugaaauauauauuaaaucugcuugccugaacuggaagauagugugacagggauacagcaacuauuuuaucaa

SEQ ID NO: 1489 - RNA, 119 nt, Artificial Sequence
  Artificial miRNA
accggacauacuuguuccacucaacuuccaguuucggcaagcaguagugaaauauauauuaaacugcuugccgggacuggaaguauagugugacagggauacagcaacuauuuuaucaa

SEQ ID NO: 1490 - RNA, 119 nt, Artificial Sequence
  Artificial miRNA
accggacauacuuguuccacucuaacuuccaguuucggcaagcauagugaaauauauauuaaaugcuugccgaggcuggaaguuuuagugugacagggauacagcaacuauuuuaucaa

SEQ ID NO: 1491 - RNA, 119 nt, Artificial Sequence
  Artificial miRNA
accggacauacuuguuccacucauaacuuccaguuucggcaagcuagugaaauauauauuaaagcuugccgaagauggaaguuaauagugugacagggauacagcaacuauuuuaucaa

SEQ ID NO: 1492 - RNA, 119 nt, Artificial Sequence
  Artificial miRNA
accggacauacuuguuccacucaauaacuuccaguuucggcaaguagugaaauauauauuaaacuugccgaaaacggaaguuauauagugugacagggauacagcaacuauuuuaucaa

SEQ ID NO: 1493 - RNA, 119 nt, Artificial Sequence
  Artificial miRNA
accggacauacuuguuccacucaaauaacuuccaguuucggcaauagugaaauauauauuaaauugccgaaaccugaaguuauuauagugugacagggauacagcaacuauuuuaucaa

SEQ ID NO: 1494 - RNA, 119 nt, Artificial Sequence
  Artificial miRNA
accggacauacuuguuccacucauaaauaacuuccaguuucggcuagugaaauauauauuaaagccgaaacugugaguuauuuaauagugugacagggauacagcaacuauuuuaucaa

SEQ ID NO: 1495 - RNA, 119 nt, Artificial Sequence
  Artificial miRNA
accggacauacuuguuccacucaauaaauaacuuccaguuucgguagugaaauauauauuaaaccgaaacuggggguuauuuauauagugugacagggauacagcaacuauuuuaucaa

SEQ ID NO: 1496 - RNA, 119 nt, Artificial Sequence
  Artificial miRNA
accggacauacuuguuccacucaaauaaauaacuuccaguuucguagugaaauauauauuaaacgaaacuggaguuuauuuauuauagugugacagggauacagcaacuauuuuaucaa

SEQ ID NO: 1497 - RNA, 119 nt, Artificial Sequence
  Artificial miRNA
accggacauacuuguuccacucaaaauaaauaacuuccaguuucuagugaaauauauauuaaagaaacuggaaucuauuuauuuauagugugacagggauacagcaacuauuuuaucaa

SEQ ID NO: 1498 - RNA, 119 nt, Artificial Sequence
  Artificial miRNA
accggacauacuuguuccacucaaaaauaaauaacuuccaguuuuagugaaauauauauuaaaaaacuggaagccauuuauuuuauagugugacagggauacagcaacuauuuuaucaa

SEQ ID NO: 1499 - RNA, 119 nt, Artificial Sequence
  Artificial miRNA
accggacauacuuguuccacucaugacuuucaaggguuauuaaauagugaaauauauauuaaauuuaauaaccacugaaagucaauagugugacagggauacagcaacuauuuuaucaa

SEQ ID NO: 1500 - RNA, 119 nt, Artificial Sequence
  Artificial miRNA
accggacauacuuguuccacucuaugacuuucaaggguuauuaauagugaaauauauauuaaauuaauaacccccgaaagucauuuagugugacagggauacagcaacuauuuuaucaa

SEQ ID NO: 1501 - RNA, 119 nt, Artificial Sequence
  Artificial miRNA
accggacauacuuguuccacucucaugacuuucaaggguuauuauagugaaauauauauuaaauaauaacccucuaaagucauguuagugugacagggauacagcaacuauuuuaucaa

SEQ ID NO: 1502 - RNA, 119 nt, Artificial Sequence
  Artificial miRNA
accggacauacuuguuccacucuucaugacuuucaaggguuauuuagugaaauauauauuaaaaauaacccuuugaagucaugauuagugugacagggauacagcaacuauuuuaucaa

SEQ ID NO: 1503 - RNA, 119 nt, Artificial Sequence
  Artificial miRNA
accggacauacuuguuccacucuuucaugacuuucaaggguuauuagugaaauauauauuaaaauaacccuugggagucaugaauuagugugacagggauacagcaacuauuuuaucaa

SEQ ID NO: 1504 - RNA, 119 nt, Artificial Sequence
  Artificial miRNA
accggacauacuuguuccacucuguucaugacuuucaaggguuauagugaaauauauauuaaauaacccuugagggucaugaacuuagugugacagggauacagcaacuauuuuaucaa

SEQ ID NO: 1505 - RNA, 119 nt, Artificial Sequence
  Artificial miRNA
accggacauacuuguuccacucuuguucaugacuuucaaggguuuagugaaauauauauuaaaaacccuugaaguucaugaacauuagugugacagggauacagcaacuauuuuaucaa

SEQ ID NO: 1506 - RNA, 119 nt, Artificial Sequence
  Artificial miRNA
accggacauacuuguuccacucuguguucaugacuuucaaggguuagugaaauauauauuaaaacccuugaaauccaugaacacuuagugugacagggauacagcaacuauuuuaucaa

SEQ ID NO: 1507 - RNA, 119 nt, Artificial Sequence
  Artificial miRNA
accggacauacuuguuccacucauguguucaugacuuucaaggguagugaaauauauauuaaacccuugaaagcaaugaacacaauagugugacagggauacagcaacuauuuuaucaa

SEQ ID NO: 1508 - RNA, 119 nt, Artificial Sequence
  Artificial miRNA
accggacauacuuguuccacucuauguguucaugacuuucaagguagugaaauauauauuaaaccuugaaaguagugaacacauuuagugugacagggauacagcaacuauuuuaucaa

SEQ ID NO: 1509 - RNA, 119 nt, Artificial Sequence
  Artificial miRNA
accggacauacuuguuccacucugauguguucaugacuuucaaguagugaaauauauauuaaacuugaaagucgcgaacacaucuuagugugacagggauacagcaacuauuuuaucaa

SEQ ID NO: 1510 - RNA, 119 nt, Artificial Sequence
  Artificial miRNA
accggacauacuuguuccacucuugauguguucaugacuuucaauagugaaauauauauuaaauugaaagucacuaacacaucauuagugugacagggauacagcaacuauuuuaucaa

SEQ ID NO: 1511 - RNA, 119 nt, Artificial Sequence
  Artificial miRNA
accggacauacuuguuccacucucugauguguucaugacuuucauagugaaauauauauuaaaugaaagucauugacacaucaguuagugugacagggauacagcaacuauuuuaucaa

SEQ ID NO: 1512 - RNA, 119 nt, Artificial Sequence
  Artificial miRNA
accggacauacuuguuccacucagcugauguguucaugacuuucuagugaaauauauauuaaagaaagucaugggcacaucagcauagugugacagggauacagcaacuauuuuaucaa

SEQ ID NO: 1513 - RNA, 119 nt, Artificial Sequence
  Artificial miRNA
accggacauacuuguuccacucuagcugauguguucaugacuuuuagugaaauauauauuaaaaaagucaugagaacaucagcuuuagugugacagggauacagcaacuauuuuaucaa

SEQ ID NO: 1514 - RNA, 119 nt, Artificial Sequence
  Artificial miRNA
accggacauacuuguuccacucuuagcugauguguucaugacuuuagugaaauauauauuaaaaagucaugaaagcaucagcuauuagugugacagggauacagcaacuauuuuaucaa

SEQ ID NO: 1515 - RNA, 119 nt, Artificial Sequence
  Artificial miRNA
accggacauacuuguuccacucucuagcugauguguucaugacuuagugaaauauauauuaaaagucaugaacgaaucagcuaguuagugugacagggauacagcaacuauuuuaucaa

SEQ ID NO: 1516 - RNA, 119 nt, Artificial Sequence
  Artificial miRNA
accggacauacuuguuccacucugcuagcugauguguucaugacuagugaaauauauauuaaagucaugaacaagucagcuagcuuagugugacagggauacagcaacuauuuuaucaa

SEQ ID NO: 1517 - RNA, 119 nt, Artificial Sequence
  Artificial miRNA
accggacauacuuguuccacucuugcuagcugauguguucaugauagugaaauauauauuaaaucaugaacacgccagcuagcauuagugugacagggauacagcaacuauuuuaucaa

SEQ ID NO: 1518 - RNA, 119 nt, Artificial Sequence
  Artificial miRNA
accggacauacuuguuccacucuuugcuagcugauguguucauguagugaaauauauauuaaacaugaacacacaagcuagcaauuagugugacagggauacagcaacuauuuuaucaa

SEQ ID NO: 1519 - RNA, 119 nt, Artificial Sequence
  Artificial miRNA
accggacauacuuguuccacucuuuugcuagcugauguguucauuagugaaauauauauuaaaaugaacacauaggcuagcaaauuagugugacagggauacagcaacuauuuuaucaa

SEQ ID NO: 1520 - RNA, 119 nt, Artificial Sequence
  Artificial miRNA
accggacauacuuguuccacucucuuuugcuagcugauguguucuagugaaauauauauuaaagaacacaucauauagcaaaaguuagugugacagggauacagcaacuauuuuaucaa

SEQ ID NO: 1521 - DNA, 6272 bp, Artificial Sequence
  H1-miR-16-2_1755-AMELY_V1_CMV_GFP_lenti vector
  misc_feature (1)..(227): RSV promoter
  misc_feature (228)..(408): 5' LTR from HIV-1 (truncated)
  misc_feature (455)..(580): HIV-1 Psi
  misc_feature (1073)..(1306): RRE of HIV-1
  misc_feature (1798)..(1888): human H1 promoter
  misc_feature (1889)..(2020): miR16-2-1755
  misc_feature (2021)..(2026): terminator
  misc_feature (2027)..(3907): AMELY_V1
  misc_feature (2883)..(2883): TRS site edit - T to G
  misc_feature (3514)..(3514): TRS site edit - T to G
  misc_feature (3919)..(4034): cPPT of HIV-1 lacking the first T
  misc_feature (4100)..(4443): CMV promoter
  misc_feature (4458)..(5174): enhanced GFP, mammalian codon-optimized
  misc_feature (5184)..(5772): WPRE
  misc_feature (5846)..(6079): 3' LTR (Delta-U3) from HIV-1
  misc_feature (6151)..(6272): SV40 poly(A) signal
tgtagtcttatgcaatactcttgtagtcttgcaacatggtaacgatgagttagcaacatgccttacaaggagagaaaaagcaccgtgcatgccgattggtggaagtaaggtggtacgatcgtgccttattaggaaggcaacagacgggtctgacatggattggacgaaccactgaattgccgcattgcagagatattgtatttaagtgcctagctcgatacataaacgggtctctctggttagaccagatctgagcctgggagctctctggctaactagggaacccactgcttaagcctcaataaagcttgccttgagtgcttcaagtagtgtgtgcccgtctgttgtgtgactctggtaactagagatccctcagacccttttagtcagtgtggaaaatctctagcagtggcgcccgaacagggacttgaaagcgaaagggaaaccagaggagctctctcgacgcaggactcggcttgctgaagcgcgcacggcaagaggcgaggggcggcgactggtgagtacgccaaaaattttgactagcggaggctagaaggagagagatgggtgcgagagcgtcagtattaagcgggggagaattagatcgcgatgggaaaaaattcggttaaggccagggggaaagaaaaaatataaattaaaacatatagtatgggcaagcagggagctagaacgattcgcagttaatcctggcctgttagaaacatcagaaggctgtagacaaatactgggacagctacaaccatcccttcagacaggatcagaagaacttagatcattatataatacagtagcaaccctctattgtgtgcatcaaaggatagagataaaagacaccaaggaagctttagacaagatagaggaagagcaaaacaaaagtaagaccaccgcacagcaagcggccactgatcttcagacctggaggaggagatatgagggacaattggagaagtgaattatataaatataaagtagtaaaaattgaaccattaggagtagcacccaccaaggcaaagagaagagtggtgcagagagaaaaaagagcagtgggaataggagctttgttccttgggttcttgggagcagcaggaagcactatgggcgcagcgtcaatgacgctgacggtacaggccagacaattattgtctggtatagtgcagcagcagaacaatttgctgagggctattgaggcgcaacagcatctgttgcaactcacagtctggggcatcaagcagctccaggcaagaatcctggctgtggaaagatacctaaaggatcaacagctcctggggatttggggttgctctggaaaactcatttgcaccactgctgtgccttggaatgctagttggagtaataaatctctggaacagatttggaatcacacgacctggatggagtgggacagagaaattaacaattacacaagcttaatacactccttaattgaagaatcgcaaaaccagcaagaaaagaatgaacaagaattattggaattagataaatgggcaagtttgtggaattggtttaacataacaaattggctgtggtatataaaattattcataatgatagtaggaggcttggtaggtttaagaatagtttttgctgtactttctatagtgaatagagttaggcagggatattcaccattatcgtttcagacccacctcccaaccccgaggggacccgacaggcccgaaggaatagaagaagaaggtggagagagagacagagacagatccattcgattagtgaacggatctcgacggtatcgatatatttgcatgtcgctatgtgttctgggaaatcaccataaacgtgaaatgtctttggatttgggaatcttataagttctgtatgagaccacttatgtttggatgaactgacatacttgttccactctcgggttgaaatctgaagtgtgtagtgaaatatatattaaacacacttcaggcttcaacccgttagtgtgacagggatacagcaactattttatcaatttttttattatgcatatcacataattttatttaaaaatcatttagattttgattgcgtgaagtacacaaccagtattccatatcctaatttgttttgtaatacagtcttcaaaagttaaatgcaaagaaattgtcatataaacttcccttcatttggttcaggtttcagtgattgtatatgttcatacatttttattttatcaacgattttaactgatgtgtaaacttcattttttaaaaagatttgacgtagtataatttcagttttctctaaaaagaaatatagtccaaatggtgaatttgtatgagtaaatgagcagttcttaccttattcaagaatactcattcataatatgttgtctcaaaagtttcattcaacacatagcaaaaggaacaattaaataatttaattgtttccagtgagtaccatttacaatacatgtattcaaaccaatgtacaaccacttaagttgaactctataatttccaaagtttctttgttcattcgttgtcattagatattaggtgtccatgaagccttcttctacctttggaacacttaaagcctattattttataacaaaataacaattctttccataaatagctttgtcaaggtgtgagcacattataaatccacggcattttctatgcacagagagaacatgtgctttagactagaatagccaatgatagtcgtcagattacttgggattcaatcaatcaatcaattttcaaaaattctgccccatatcacaattattaagccatttataacatatattatgattttttaattcagaagttatcacatttatacagtagtatatcatcaatagcttgtataaattggaattacaggtggatacatataagtgatagatcacataatcttatatacgtagaaataagattttatggatgtggataaagtttttttattgattattcccattcatttgtaagtgcttcttgtaatgggagattcagtcataaattgaggtaacttctttttaaaagcttaatcatctcaagttagactgaaaactactgaaaatgggaaaccttcgtataggtttttttaaagagatttcccatctacctttcatagcttgttcaaatatatgcactctaaaaattacccaccccatcttatcttaagccttcactgcaattctagcctcttcttgtgagtcaaatctttgaaatgaaagaactgatattcccttattgctgttgcccttaaaattaagagggtttaataatatatttttctattaatgggttgtcataatatacagtctggtagaaattcaataataataaaatttaaacctatcataaaaactgtgttcttaattaccaagccatttagataaatttgtttataatgtaaagatacaacatattacttggactaatagaatcatagatctgtaactactacaactctagaccctgagttgttggaccccttagaactctggggccacctttgctgcaccattttcacaggatttgcattgtagtggcttcacagagagtgactccaaccagagaagcagcagtgttgtctttgccattatggccataggaatattgtatttcaaaaatttgtaactgtgtacacagacatgattttttacaaactaaatttcccattagtgtctgtatgtggagtacacatggtattttcttaaaaatgcctaatattttcagggaattacagatatattagaatccatttgatttaatttactttcatcccatgcagaaattcactgatgcggtaggaaataagaagaaggtaaaactgtttatttccataggtcctgcttttcattgtaagagcaaagcaaacataaaattatgccgcaataatgtgaacctcgagcaatttaaaagaaaaggggggattggggggtacagtgcaggggaaagaatagtagacataatagcaacagacatacaaactaaagaattacaaaaacaaattacaaaaattcaaaatttctgcgttgttgtcggtgctcgttctctgctcttcacgctactgaattcatcaccggttcttcgaaattatgcccagtacatgaccttatgggactttcctacttggcagtacatctacgtattagtcatcgctattaccatggtgatgcggttttggcagtacatcaatgggcgtggatagcggtttgactcacggggatttccaagtctccaccccattgacgccaatgggagtttgttttggcaccaaaatcaacgggactttccaaaatgtcgtaacaactccgccccattgacgcaaatgggcggtaggcgtgtacggtggaaggtttatataagcagagctcgtttagtgaaccgtcagatcgcctggagacgccatccacgctgttttgacctccatagaagattctagacgccaccatggtgagcaagggcgaggagctgttcaccggggtggtgcccatcctggtcgagctggacggcgacgtaaacggccacaagttcagcgtgtccggcgagggcgagggcgatgccacctacggcaagctgaccctgaagttcatctgcaccaccggcaagctgcccgtgccctggcccaccctcgtgaccaccctgacctacggcgtgcagtgcttcagccgctaccccgaccacatgaagcagcacgacttcttcaagtccgccatgcccgaaggctacgtccaggagcgcaccatcttcttcaaggacgacggcaactacaagacccgcgccgaggtgaagttcgagggcgacaccctggtgaaccgcatcgagctgaagggcatcgacttcaaggaggacggcaacatcctggggcacaagctggagtacaactacaacagccacaacgtctatatcatggccgacaagcagaagaacggcatcaaggtgaacttcaagatccgccacaacatcgaggacggcagcgtgcagctcgccgaccactaccagcagaacacccccatcggcgacggccccgtgctgctgcccgacaaccactacctgagcacccagtccgccctgagcaaagaccccaacgagaagcgcgatcacatggtcctgctggagttcgtgaccgccgccgggatcactctcggcatggacgagctgtacaagtgagtcgacaatcaacctctggattacaaaatttgtgaaagattgactggtattcttaactatgttgctccttttacgctatgtggatacgctgctttaatgcctttgtatcatgctattgcttcccgtatggctttcattttctcctccttgtataaatcctggttgctgtctctttatgaggagttgtggcccgttgtcaggcaacgtggcgtggtgtgcactgtgtttgctgacgcaacccccactggttggggcattgccaccacctgtcagctcctttccgggactttcgctttccccctccctattgccacggcggaactcatcgccgcctgccttgcccgctgctggacaggggctcggctgttgggcactgacaattccgtggtgttgtcggggaaatcatcgtcctttccttggctgctcgcctgtgttgccacctggattctgcgcgggacgtccttctgctacgtcccttcggccctcaatccagcggaccttccttcccgcggcctgctgccggctctgcggcctcttccgcgtctccgccttcgccctcagacgagtcggatctctctttgggccgcctccccgcctggtacctttaagaccaatgacttacaaggcagctgtagatcttagccactttttaaaagaaaaggggggactggaagggctaattcactcccaacgaagataagatctgctttttgcttgtactgggtctctctggttagaccagatctgagcctgggagctctctggctaactagggaacccactgcttaagcctcaataaagcttgccttgagtgcttcaagtagtgtgtgcccgtctgttgtgtgactctggtaactagagatccctcagacccttttagtcagtgtggaaaatctctagcagtagtagttcatgtcatcttattattcagtatttataacttgcaaagaaatgaatatcagagagtgagaggaacttgtttattgcagcttataatggttacaaataaagcaatagcatcacaaatttcacaaataaagcatttttttcactgcattctagttgtggtttgtccaaactcatcaatgtatctta

SEQ ID NO: 1522 - DNA, 2401 bp, Artificial Sequence
  scAAV_AMELY_V1_H1_micropool_miR_ITR_to_ITR vector
  misc_feature (1)..(106): 5' ITR
  misc_feature (113)..(203): H1 promoter
  misc_feature (204)..(341): n is a, g, c, or t
  misc_feature (204)..(341): miR insert
  misc_feature (342)..(347): terminator
  misc_feature (348)..(2228): AMELY_ITR_Stuffer_V1
  misc_feature (2235)..(2401): 3' ITR
ctgcgcgctcgctcgctcactgaggccgcccgggcaaagcccgggcgtcgggcgacctttggtcgcccggcctcagtgagcgagcgagcgcgcagagagggagtggacgcgtatatttgcatgtcgctatgtgttctgggaaatcaccataaacgtgaaatgtctttggatttgggaatcttataagttctgtatgagaccacnnnnnnnnnnnnnnnnnnnnnnnnnnnnnnnnnnnnnnnnnnnnnnnnnnnnnnnnnnnnnnnnnnnnnnnnnnnnnnnnnnnnnnnnnnnnnnnnnnnnnnnnnnnnnnnnnnnnnnnnnnnnnnnnnnnnnnnnnntttttttattatgcatatcacataattttatttaaaaatcatttagattttgattgcgtgaagtacacaaccagtattccatatcctaatttgttttgtaatacagtcttcaaaagttaaatgcaaagaaattgtcatataaacttcccttcatttggttcaggtttcagtgattgtatatgttcatacatttttattttatcaacgattttaactgatgtgtaaacttcattttttaaaaagatttgacgtagtataatttcagttttctctaaaaagaaatatagtccaaatggtgaatttgtatgagtaaatgagcagttcttaccttattcaagaatactcattcataatatgttgtctcaaaagtttcattcaacacatagcaaaaggaacaattaaataatttaattgtttccagtgagtaccatttacaatacatgtattcaaaccaatgtacaaccacttaagttgaactctataatttccaaagtttctttgttcattcgttgtcattagatattaggtgtccatgaagccttcttctacctttggaacacttaaagcctattattttataacaaaataacaattctttccataaatagctttgtcaaggtgtgagcacattataaatccacggcattttctatgcacagagagaacatgtgctttagactagaatagccaatgatagtcgtcagattacttgggattcaatcaatcaatcaattttcaaaaattctgccccatatcacaattattaagccatttataacatatattatgattttttaattcagaagttatcacatttatacagtagtatatcatcaatagcttgtataaattggaattacaggtggatacatataagtgatagatcacataatcttatatacgtagaaataagattttatggatgtggataaagtttttttattgattattcccattcatttgtaagtgcttcttgtaatgggagattcagtcataaattgaggtaacttctttttaaaagcttaatcatctcaagttagactgaaaactactgaaaatgggaaaccttcgtataggtttttttaaagagatttcccatctacctttcatagcttgttcaaatatatgcactctaaaaattacccaccccatcttatcttaagccttcactgcaattctagcctcttcttgtgagtcaaatctttgaaatgaaagaactgatattcccttattgctgttgcccttaaaattaagagggtttaataatatatttttctattaatgggttgtcataatatacagtctggtagaaattcaataataataaaatttaaacctatcataaaaactgtgttcttaattaccaagccatttagataaatttgtttataatgtaaagatacaacatattacttggactaatagaatcatagatctgtaactactacaactctagaccctgagttgttggaccccttagaactctggggccacctttgctgcaccattttcacaggatttgcattgtagtggcttcacagagagtgactccaaccagagaagcagcagtgttgtctttgccattatggccataggaatattgtatttcaaaaatttgtaactgtgtacacagacatgattttttacaaactaaatttcccattagtgtctgtatgtggagtacacatggtattttcttaaaaatgcctaatattttcagggaattacagatatattagaatccatttgatttaatttactttcatcccatgcagaaattcactgatgcggtaggaaataagaagaaggtaaaactgtttatttccataggtcctgcttttcattgtaagagcaaagcaaacataaaattatgccgcaataatgtgagctagcgtagataagtagcatggcgggttaatcattaactacaaggaacccctagtgatggagttggccactccctctctgcgcgctcgctcgctcactgaggccgggcgaccaaaggtcgcccgacgcccgggctttgcccgggcggcctcagtgagcgagcgagcgcgcag

SEQ ID NO: 1523 - DNA, 17 bp, Artificial Sequence
  miRNA backbone components
catgcagactgcctgct

SEQ ID NO: 1524 - DNA, 18 bp, Artificial Sequence
  miRNA backbone components
tatggacctgctaagcta

SEQ ID NO: 1525 - DNA, 51 bp, Artificial Sequence; identical to SEQ ID NO: 495
  miRNA backbone components

SEQ ID NO: 1526 - DNA, 17 bp, Artificial Sequence
  miRNA backbone components
catgcagactgcctgct

SEQ ID NO: 1527 - DNA, 18 bp, Artificial Sequence
  miRNA backbone components
tatggacctgctaagcta

SEQ ID NO: 1528 - DNA, 51 bp, Artificial Sequence
  miRNA backbone components
ggccgggacctcttccgccgcactgaggggcactccacaccacgggggccg

SEQ ID NO: 1529 - DNA, 24 bp, Artificial Sequence
  miRNA backbone components
cccaaaagagagaagatattgagg

SEQ ID NO: 1530 - DNA, 12 bp, Artificial Sequence
  miRNA backbone components
cctgttgccaca

SEQ ID NO: 1531 - DNA, 11 bp, Artificial Sequence
  miRNA backbone components
gtattagtccg

SEQ ID NO: 1532 - DNA, 13 bp, Artificial Sequence
  miRNA backbone components
tgtgtctgttagg

SEQ ID NO: 1533 - DNA, 34 bp, Artificial Sequence; identical to SEQ ID NO: 500
  miRNA backbone components

SEQ ID NO: 1534 - DNA, 24 bp, Artificial Sequence
  miRNA backbone components
cccaaaagagagaagatattgatg

SEQ ID NO: 1535 - DNA, 12 bp, Artificial Sequence
  miRNA backbone components
cctgttgccaca

SEQ ID NO: 1536 - DNA, 11 bp, Artificial Sequence
  miRNA backbone components
gtattagtccg

SEQ ID NO: 1537 - DNA, 13 bp, Artificial Sequence
  miRNA backbone components
tgtgtctgttagg

SEQ ID NO: 1538 - DNA, 34 bp, Artificial Sequence
  miRNA backbone components
ctattccacggacctggggctttgcttatatgcc

SEQ ID NO: 1539 - DNA, 13 bp, Artificial Sequence
  miRNA backbone components
ggctacagagttt

SEQ ID NO: 1540 - DNA, 14 bp, Artificial Sequence
  miRNA backbone components
ccttagcagagctg

SEQ ID NO: 1541 - DNA, 12 bp, Artificial Sequence
  miRNA backbone components
tgtctaaactat

SEQ ID NO: 1542 - DNA, 15 bp, Artificial Sequence
  miRNA backbone components
tagctactgctaggc

SEQ ID NO: 1543 - DNA, 40 bp, Artificial Sequence; identical to SEQ ID NO: 505
  miRNA backbone components

SEQ ID NO: 1544 - DNA, 13 bp, Artificial Sequence
  miRNA backbone components
ggctacagagttt

SEQ ID NO: 1545 - DNA, 14 bp, Artificial Sequence
  miRNA backbone components
gcttagcagagctg

SEQ ID NO: 1546 - DNA, 12 bp, Artificial Sequence
  miRNA backbone components
tgtctaaactat

SEQ ID NO: 1547 - DNA, 15 bp, Artificial Sequence
  miRNA backbone components
tagctactgctaggc

SEQ ID NO: 1548 - DNA, 40 bp, Artificial Sequence
  miRNA backbone components
catccttccctcgataaatgtcttggcatcgtttgctttg

SEQ ID NO: 1549 - DNA, 17 bp, Artificial Sequence
  miRNA backbone components
ttccttcctcaggagaa

SEQ ID NO: 1550 - DNA, 11 bp, Artificial Sequence
  miRNA backbone components
aggcctctctc

SEQ ID NO: 1551 - DNA, 19 bp, Artificial Sequence
  miRNA backbone components
atttaaatgtccatacaat

SEQ ID NO: 1552 - DNA, 11 bp, Artificial Sequence
  miRNA backbone components
gaatggggctg

SEQ ID NO: 1553 - DNA, 36 bp, Artificial Sequence; identical to SEQ ID NO: 510
  miRNA backbone components

SEQ ID NO: 1554 - DNA, 17 bp, Artificial Sequence
  miRNA backbone components
ttccttcctcaggagaa

SEQ ID NO: 1555 - DNA, 11 bp, Artificial Sequence
  miRNA backbone components
tggcctctctc

SEQ ID NO: 1556 - DNA, 19 bp, Artificial Sequence
  miRNA backbone components
atttaaatgtccatacaat

SEQ ID NO: 1557 - DNA, 11 bp, Artificial Sequence
  miRNA backbone components
gaatggggctt

SEQ ID NO: 1558 - DNA, 36 bp, Artificial Sequence
  miRNA backbone components
actgccgcacgtgggtcggcgagggcccgccaagga

SEQ ID NO: 1559 - DNA, 25 bp, Artificial Sequence
  miRNA backbone components
attttgcaataattggccttgttcc

SEQ ID NO: 1560 - DNA, 12 bp, Artificial Sequence
  miRNA backbone components
tgagctgttgga

SEQ ID NO: 1561 - DNA, 14 bp, Artificial Sequence
  miRNA backbone components
gaggtttacatttc

SEQ ID NO: 1562 - DNA, 12 bp, Artificial Sequence
  miRNA backbone components
ttcagctgcttc

SEQ ID NO: 1563 - DNA, 31 bp, Artificial Sequence; identical to SEQ ID NO: 515
  miRNA backbone components

SEQ ID NO: 1564 - DNA, 18 bp, Artificial Sequence
  miRNA backbone components
gcagggccggcatgcctc

SEQ ID NO: 1565 - DNA, 12 bp, Artificial Sequence
  miRNA backbone components
tgctgctggcca

SEQ ID NO: 1566 - DNA, 20 bp, Artificial Sequence
  miRNA backbone components
ctgtctgcacctgtcactag

SEQ ID NO: 1567 - DNA, 13 bp, Artificial Sequence
  miRNA backbone components
tggccgtgtagtg

SEQ ID NO: 1568 - DNA, 31 bp, Artificial Sequence; identical to SEQ ID NO: 520
  miRNA backbone components

SEQ ID NO: 1569 - DNA, 15 bp, Artificial Sequence
  miRNA backbone components
ctggaggcttgcttt

SEQ ID NO: 1570 - DNA, 13 bp, Artificial Sequence
  miRNA backbone components
gggctgtatgctg

SEQ ID NO: 1571 - DNA, 17 bp, Artificial Sequence
  miRNA backbone components
ttttggcctctgactga

SEQ ID NO: 1572 - DNA, 13 bp, Artificial Sequence
  miRNA backbone components
caggacaaggccc

SEQ ID NO: 1573 - DNA, 36 bp, Artificial Sequence; identical to SEQ ID NO: 525
  miRNA backbone components

SEQ ID NO: 1574 - DNA, 16 bp, Artificial Sequence
  miRNA backbone components
cctggaggcttgctga

SEQ ID NO: 1575 - DNA, 13 bp, Artificial Sequence
  miRNA backbone components
aggctgtatgctg

SEQ ID NO: 1576 - DNA, 17 bp, Artificial Sequence
  miRNA backbone components
ttttggccactgactga

SEQ ID NO: 1577 - DNA, 14 bp, Artificial Sequence
  miRNA backbone components
caggacacaaggcc

SEQ ID NO: 1578 - DNA, 34 bp, Artificial Sequence; identical to SEQ ID NO: 530
  miRNA backbone components

SEQ ID NO: 1579 - DNA, 19 bp, Artificial Sequence
  miRNA backbone components
gccggcggagttctggtat

SEQ ID NO: 1580 - DNA, 24 bp, Artificial Sequence
  miRNA backbone components
gacgagcagcgcatcctcttaccc

SEQ ID NO: 1581 - DNA, 35 bp, Artificial Sequence
  miRNA backbone components
tacccatcctctccaggcgagcctcgtgggaccgg

SEQ ID NO: 1582 - DNA, 26 bp, Artificial Sequence
  miRNA backbone components
tcaagccatgcttcctgtgcccccag

SEQ ID NO: 1583 - DNA, 13 bp, Artificial Sequence
  miRNA backbone components
tggggccctggct

SEQ ID NO: 1584 - DNA, 17 bp, Artificial Sequence
  miRNA backbone components
agtttgcgatgagacac

SEQ ID NO: 1585 - DNA, 15 bp, Artificial Sequence
  miRNA backbone components
agtccgggcaccccc

SEQ ID NO: 1586 - DNA, 26 bp, Artificial Sequence
  miRNA backbone components
agctctggagcctgacaaggaggaca

SEQ ID NO: 1587 - DNA, 28 bp, Artificial Sequence
  miRNA backbone components
gagctcagtcaaacctggatgccttttc

SEQ ID NO: 1588 - DNA, 14 bp, Artificial Sequence
  miRNA backbone components
tgcaggcctctgtg

SEQ ID NO: 1589 - DNA, 14 bp, Artificial Sequence
  miRNA backbone components
tgttatttaatcca

SEQ ID NO: 1590 - DNA, 15 bp, Artificial Sequence
  miRNA backbone components
ctacagtgtcttgcc

SEQ ID NO: 1591 - DNA, 25 bp, Artificial Sequence
  miRNA backbone components
ctgtctccgggggttcctaataaag

SEQ ID NO: 1592 - DNA, 28 bp, Artificial Sequence
  miRNA backbone components
gagctcagtcaaacctggatgccttttc

SEQ ID NO: 1593 - DNA, 14 bp, Artificial Sequence
  miRNA backbone components
tgcaggcgtctgtg

SEQ ID NO: 1594 - DNA, 14 bp, Artificial Sequence
  miRNA backbone components
tgttatttaatcca

SEQ ID NO: 1595 - DNA, 15 bp, Artificial Sequence
  miRNA backbone components
ctacagtctcttgcc

SEQ ID NO: 1596 - DNA, 25 bp, Artificial Sequence
  miRNA backbone components
ctgtctccgggggttcctaataaag

SEQ ID NO: 1597 - DNA, 14 bp, Artificial Sequence
  miRNA backbone components
gccgtccgcgcgcc

SEQ ID NO: 1598 - DNA, 20 bp, Artificial Sequence
  miRNA backbone components
ccgcccccgcgtctccaggg

SEQ ID NO: 1599 - DNA, 16 bp, Artificial Sequence
  miRNA backbone components
ctgtgggaactggagg

SEQ ID NO: 1600 - DNA, 21 bp, Artificial Sequence
  miRNA backbone components
ccccgcagcacgcccacgcgc

SEQ ID NO: 1601 - DNA, 23 bp, Artificial Sequence
  miRNA backbone components
cgcgccacgccgcgccccgagcc

SEQ ID NO: 1602 - DNA, 42 bp, Artificial Sequence
  miRNA backbone components
gctctctgctcagcctgtcacaacctactgactgccagggca

SEQ ID NO: 1603 - DNA, 16 bp, Artificial Sequence
  miRNA backbone components
cttgggaatggcaagg

SEQ ID NO: 1604 - DNA, 16 bp, Artificial Sequence
  miRNA backbone components
tcttgctatacccaga

SEQ ID NO: 1605 - DNA, 24 bp, Artificial Sequence
  miRNA backbone components
aaacgtgccaggaagagaactcag

SEQ ID NO: 1606 - DNA, 19 bp, Artificial Sequence
  miRNA backbone components
tccccacagaagctcttgg

SEQ ID NO: 1607 - DNA, 24 bp, Artificial Sequence
  miRNA backbone components
cctggcctcctgcagtgccacgct

SEQ ID NO: 1608 - DNA, 15 bp, Artificial Sequence
  miRNA backbone components
ctccatgtggtagag

SEQ ID NO: 1609 - DNA, 21 bp, Artificial Sequence
  miRNA backbone components
agtgcggcacatgcttaccag

SEQ ID NO: 1610 - DNA, 26 bp, Artificial Sequence
  miRNA backbone components
ttatgtttggatgaactgacatactt

SEQ ID NO: 1611 - DNA, 19 bp, Artificial Sequence
  miRNA backbone components
tagtgaaatatatattaaa

SEQ ID NO: 1612 - DNA, 31 bp, Artificial Sequence
  miRNA backbone components
agggatacagcaactattttatcaattgttt

SEQ ID NO: 1613 - DNA, 5740 bp, Artificial Sequence
  pLVX_EF1A-amiR vector
  misc_feature (1)..(635): 5' LTR
  misc_feature (681)..(806): Packaging signal
  misc_feature (1303)..(1536): RRE
  misc_feature (2356)..(2567): EF1A core promoter
  misc_feature (2568)..(2896): EF1A Intron
  misc_feature (2897)..(3072): EF-1-alpha intron A (truncated)
  misc_feature (3126)..(3263): n is a, g, c, or t
  misc_feature (3126)..(3263): amiR Insert
  misc_feature (3336)..(3931): Modified WPRE
  misc_feature (3939)..(4282): CMV promoter
  misc_feature (4295)..(4891): Puro
  misc_feature (5107)..(5740): 3'LTR
tggaagggctaattcactcccaaagaagacaagatatccttgatctgtggatctaccacacacaaggctacttccctgattagcagaactacacaccagggccaggggtcagatatccactgacctttggatggtgctacaagctagtaccagttgagccagataaggtagaagaggccaataaaggagagaacaccagcttgttacaccctgtgagcctgcatgggatggatgacccggagagagaagtgttagagtggaggtttgacagccgcctagcatttcatcacgtggcccgagagctgcatccggagtacttcaagaactgctgatatcgagcttgctacaagggactttccgctggggactttccagggaggcgtggcctgggcgggactggggagtggcgagccctcagatcctgcatataagcagctgctttttgcctgtactgggtctctctggttagaccagatctgagcctgggagctctctggctaactagggaacccactgcttaagcctcaataaagcttgccttgagtgcttcaagtagtgtgtgcccgtctgttgtgtgactctggtaactagagatccctcagacccttttagtcagtgtggaaaatctctagcagtggcgcccgaacagggacttgaaagcgaaagggaaaccagaggagctctctcgacgcaggactcggcttgctgaagcgcgcacggcaagaggcgaggggcggcgactggtgagtacgccaaaaattttgactagcggaggctagaaggagagagatgggtgcgagagcgtcagtattaagcgggggagaattagatcgcgatgggaaaaaattcggttaaggccagggggaaagaaaaaatataaattaaaacatatagtatgggcaagcagggagctagaacgattcgcagttaatcctggcctgttagaaacatcagaaggctgtagacaaatactgggacagctacaaccatcccttcagacaggatcagaagaacttagatcattatataatacagtagcaaccctctattgtgtgcatcaaaggatagagataaaagacaccaaggaagctttagacaagatagaggaagagcaaaacaaaagtaagaccaccgcacagcaagcggccggccgctgatcttcagacctggaggaggagatatgagggacaattggagaagtgaattatataaatataaagtagtaaaaattgaaccattaggagtagcacccaccaaggcaaagagaagagtggtgcagagagaaaaaagagcagtgggaataggagctttgttccttgggttcttgggagcagcaggaagcactatgggcgcagcgtcaatgacgctgacggtacaggccagacaattattgtctggtatagtgcagcagcagaacaatttgctgagggctattgaggcgcaacagcatctgttgcaactcacagtctggggcatcaagcagctccaggcaagaatcctggctgtggaaagatacctaaaggatcaacagctcctggggatttggggttgctctggaaaactcatttgcaccactgctgtgccttggaatgctagttggagtaataaatctctggaacagatttggaatcacacgacctggatggagtgggacagagaaattaacaattacacaagcttaatacactccttaattgaagaatcgcaaaaccagcaagaaaagaatgaacaagaattattggaattagataaatgggcaagtttgtggaattggtttaacataacaaattggctgtggtatataaaattattcataatgatagtaggaggcttggtaggtttaagaatagtttttgctgtactttctatagtgaatagagttaggcagggatattcaccattatcgtttcagacccacctcccaaccccgaggggacccgacaggcccgaaggaatagaagaagaaggtggagagagagacagagacagatccattcgattagtgaacggatctcgacggtatcgcctttaaaagaaaaggggggattggggggtacagtgcaggggaaagaatagtagacataatagcaacagacatacaaactaaagaattacaaaaacaaattacaaaaattcaaaattttcgggtttattacagggacagcagagatccagtttatcgatgagtaattcatacaaaaggactcgcccctgccttggggaatcccagggaccgtcgttaaactcccactaacgtagaacccagagatcgctgcgttcccgccccctcacccgcccgctctcgtcatcactgaggtggagaagagcatgcgtgaggctccggtgcccgtcagtgggcagagcgcacatcgcccacagtccccgagaagttggggggaggggtcggcaattgaaccggtgcctagagaaggtggcgcggggtaaactgggaaagtgatgtcgtgtactggctccgcctttttcccgagggtgggggagaaccgtatataagtgcagtagtcgccgtgaacgttctttttcgcaacgggtttgccgccagaacacaggtaagtgccgtgtgtggttcccgcgggcctggcctctttacgggttatggcccttgcgtgccttgaattacttccacgcccctggctgcagtacgtgattcttgatcccgagcttcgggttggaagtgggtgggagagttcgaggccttgcgcttaaggagccccttcgcctcgtgcttgagttgaggcctggcttgggcgctggggccgccgcgtgcgaatctggtggcaccttcgcgcctgtctcgctgctttcgataagtctctagccatttaaaatttttgatgacctgctgcgacgctttttttctggcaagatagtcttgtaagttggggggaggggttttatgcgatggagtttccccacactgagtgggtggagactgaagttaggccagcttggcacttgatgtaattctccttggaatttgccctttttgagtttggatcttggttcattctcaagcctcagacagtggttcaaagtttttttcttccatttcaggtgtcgtgaggatctatttccggtgaagtaagcctgcaggaattgcctagggtnnnnnnnnnnnnnnnnnnnnnnnnnnnnnnnnnnnnnnnnnnnnnnnnnnnnnnnnnnnnnnnnnnnnnnnnnnnnnnnnnnnnnnnnnnnnnnnnnnnnnnnnnnnnnnnnnnnnnnnnnnnnnnnnnnnnnnnnnncactagtaagccaggtcgagacatgtttaagggttccggttccactaggtacaattcgataccagacttgtggataatcaacctgcaggtgacaaaatttgtgaaagattgactggtattcttaactatgttgctccttttacgctatgtggatacgctgctttaatgcctttgtatcatgctattgcttcccgtatggctttcattttctcctccttgtataaatcctggttgctgtctctttatgaggagttgtggcccgttgtcaggcaacgtggcgtggtgtgcactgtgtttgctgacgcaacccccactggttggggcattgccaccacctgtcagctcctttccgggactttcgctttccccctccctattgccacggcggaactcatcgccgcctgccttgcccgctgctggacaggggctcggctgttgggcactgacaattccgtggtgttgtcggggaaatcatcgtcctttccttggctgctcgcctgtgttgccacctggattctgcgcgggacgtccttctgctacgtcccttcggccctcaatccagcggaccttccttcccgcggcctgctgccggctctgcggcctcttccgcgtcttcgccttcgccctcagacgagtcggatctccctttgggccgcctccccgcatcggatcccgattatgcccagtacatgaccttatgggactttcctacttggcagtacatctacgtattagtcatcgctattaccatggtgatgcggttttggcagtacatcaatgggcgtggatagcggtttgactcacggggatttccaagtctccaccccattgacgccaatgggagtttgttttggcaccaaaatcaacgggactttccaaaatgtcgtaacaactccgccccattgacgcaaatgggcggtaggcgtgtacggtggaaggtttatataagcagagctcgtttagtgaaccgtcagatcgcctggagacgccatccacgctgttttgacctccatagaagacacgtggccaccatgaccgagtacaagcccacggtgcgcctcgccacccgcgacgacgtcccccgggccgtacgcaccctcgccgccgcgttcgccgactaccccgccacgcgccacaccgtcgacccggaccgccacatcgagcgggtcaccgagctgcaagaactcttcctcacgcgcgtcgggctcgacatcggcaaggtgtgggtcgcggacgacggcgccgcggtggcggtctggaccacgccggagagcgtcgaagcgggggcggtgttcgccgagatcggcccgcgcatggccgagttgagcggttcccggctggccgcgcagcaacagatggaaggcctcctggcgccgcaccggcccaaggagcccgcgtggttcctggccaccgtcggcgtctcgcccgaccaccagggcaagggtctgggcagcgccgtcgtgctccccggagtggaggcggccgagcgcgccggggtgcccgccttcctggagacctccgcgccccgcaacctccccttctacgagcggctcggcttcaccgtcaccgccgacgtcgaggtgcccgaaggaccgcgcacctggtgcatgacccgcaagcccggtgcctagacgcgtctggaattaattctgcagtcgagacctagaaaaacatggagcaatcacaagtagcaatacagcagctaccaatgctgattgtgcctggctagaagcacaagaggaggaggaggtgggttttccagtcacacctcaggtacctttaagaccaatgacttacaaggcagctgtagatcttagccactttttaaaagaaaagaggggactggaagggctaattcactcccaacgaagacaagatatccttgatctgtggatctaccacacacaaggctacttccctgattagcagaactacacaccagggccaggggtcagatatccactgacctttggatggtgctacaagctagtaccagttgagccagataaggtagaagaggccaataaaggagagaacaccagcttgttacaccctgtgagcctgcatgggatggatgacccggagagagaagtgttagagtggaggtttgacagccgcctagcatttcatcacgtggcccgagagctgcatccggagtacttcaagaactgctgatatcgagcttgctacaagggactttccgctggggactttccagggaggcgtggcctgggcgggactggggagtggcgagccctcagatcctgcatataagcagctgctttttgcctgtactgggtctctctggttagaccagatctgagcctgggagctctctggctaactagggaacccactgcttaagcctcaataaagcttgccttgagtgcttcaagtagtgtgtgcccgtctgttgtgtgactctggtaactagagatccctcagacccttttagtcagtgtggaaaatctctagca

SEQ ID NO: 1614 - DNA, 22 bp, Artificial Sequence
  Guide Sequence
tatgctgagactgataatgtgg

SEQ ID NO: 1615 - DNA, 22 bp, Artificial Sequence
  Guide Sequence
tttggtgcaaaacaaacaggct

SEQ ID NO: 1616 - DNA, 22 bp, Artificial Sequence
  Guide Sequence
tttagtagttgatccatagatt

SEQ ID NO: 1617 - DNA, 22 bp, Artificial Sequence
  Guide Sequence
atagacatgaggatgctgagac

SEQ ID NO: 1618 - DNA, 22 bp, Artificial Sequence
  Guide Sequence
aggactgtaggcaacatattgc

SEQ ID NO: 1619 - DNA, 22 bp, Artificial Sequence
  Guide Sequence
actgatgtaagtatatgaacca

SEQ ID NO: 1620 - DNA, 22 bp, Artificial Sequence
  Guide Sequence
tacatgaggatgctgagactga

SEQ ID NO: 1621 - DNA, 22 bp, Artificial Sequence
  Guide Sequence
tagattcagaagtagaacttgg

SEQ ID NO: 1622 - DNA, 22 bp, Artificial Sequence
  Guide Sequence
actggaatttctctgaactgct

SEQ ID NO: 1623 - DNA, 22 bp, Artificial Sequence
  Guide Sequence
aggatgctgagactgataatgt

SEQ ID NO: 1624 - DNA, 22 bp, Artificial Sequence
  Guide Sequence
tatgtcttggcttgattcactg

SEQ ID NO: 1625 - DNA, 22 bp, Artificial Sequence
  Guide Sequence
aacgtgagaaggatggatcgta

SEQ ID NO: 1626 - DNA, 22 bp, Artificial Sequence
  Guide Sequence
tggaatttctctgaactgctgt

SEQ ID NO: 1627 - DNA, 22 bp, Artificial Sequence
  Guide Sequence
ttcactttagcactgatagcag

SEQ ID NO: 1628 - DNA, 22 bp, Artificial Sequence
  Guide Sequence
taggactgtaggcaacatattg

SEQ ID NO: 1629 - DNA, 22 bp, Artificial Sequence
  Guide Sequence
actgtaggcaacatattgcgtg

SEQ ID NO: 1630 - DNA, 22 bp, Artificial Sequence
  Guide Sequence
agattcagaagtagaacttggc

SEQ ID NO: 1631 - DNA, 22 bp, Artificial Sequence
  Guide Sequence
atgtcttggcttgattcactgg

SEQ ID NO: 1632 - DNA, 22 bp, Artificial Sequence
  Guide Sequence
tgagttatctctttctaagggc

SEQ ID NO: 1633 - DNA, 23 bp, Artificial Sequence
  Passenger Sequence
tgagccaaagccttctaccgaca

SEQ ID NO: 1634 - DNA, 20 bp, Artificial Sequence
  Passenger Sequence
ccattatcagtctcagcacc

SEQ ID NO: 1635 - DNA, 21 bp, Artificial Sequence
  Passenger Sequence
ccggtttgtttatgcaccaaa

SEQ ID NO: 1636 - DNA, 21 bp, Artificial Sequence
  Passenger Sequence
tcgatggatcatactactaaa

SEQ ID NO: 1637 - DNA, 23 bp, Artificial Sequence
  Passenger Sequence
gactcagcatcctcatgtgatat

SEQ ID NO: 1638 - DNA, 22 bp, Artificial Sequence
  Passenger Sequence
cccaaaccagacccttgctcat

SEQ ID NO: 1639 - DNA, 22 bp, Artificial Sequence
  Passenger Sequence
agcctgcttggtttgcaacaat

SEQ ID NO: 1640 - DNA, 22 bp, Artificial Sequence
  Passenger Sequence
cacactccagctttcaaaccgt

SEQ ID NO: 1641 - DNA, 22 bp, Artificial Sequence
  Passenger Sequence
gcaatacgtttcctacaatcca

SEQ ID NO: 1642 - DNA, 20 bp, Artificial Sequence
  Passenger Sequence
tggcatatacttacatcaag

SEQ ID NO: 1643 - DNA, 20 bp, Artificial Sequence
  Passenger Sequence
cccatcagccccttgttccc

SEQ ID NO: 1644 - DNA, 22 bp, Artificial Sequence
  Passenger Sequence
cgcaaatcagacccttgttcac

SEQ ID NO: 1645 - DNA, 23 bp, Artificial Sequence
  Passenger Sequence
ctcacttcagatttcaacgacga

SEQ ID NO: 1646 - DNA, 22 bp, Artificial Sequence
  Passenger Sequence
cacacttcagacttcaaccata

SEQ ID NO: 1647 - DNA, 23 bp, Artificial Sequence
  Passenger Sequence
cgcaaatcagccccttgtcgcaa

SEQ ID NO: 1648 - DNA, 22 bp, Artificial Sequence
  Passenger Sequence
ctcacttcagctttcaattcgc

SEQ ID NO: 1649 - DNA, 22 bp, Artificial Sequence
  Passenger Sequence
tgccaaatcatccccttgttcc

SEQ ID NO: 1650 - DNA, 23 bp, Artificial Sequence
  Passenger Sequence
tgtcagccaaagccttctcccta

SEQ ID NO: 1651 - DNA, 23 bp, Artificial Sequence
  Passenger Sequence
tgagtctcagcatcctcacggta

SEQ ID NO: 1652 - DNA, 20 bp, Artificial Sequence
  Passenger Sequence
cccaaatcgcccttgttcaa

SEQ ID NO: 1653 - DNA, 20 bp, Artificial Sequence
  Passenger Sequence
ccaagttcactctgaatcta

SEQ ID NO: 1654 - DNA, 20 bp, Artificial Sequence
  Passenger Sequence
agcttcagagaaattccaag

SEQ ID NO: 1655 - DNA, 22 bp, Artificial Sequence
  Passenger Sequence
acattatcagtatcagcataat

SEQ ID NO: 1656 - DNA, 22 bp, Artificial Sequence
  Passenger Sequence
cagtgactcacgccaagccatt

SEQ ID NO: 1657 - DNA, 22 bp, Artificial Sequence
  Passenger Sequence
gtctcagcatcatcatgtcgct

SEQ ID NO: 1658 - DNA, 22 bp, Artificial Sequence
  Passenger Sequence
gcctcagcatcataatgtctat

SEQ ID NO: 1659 - DNA, 23 bp, Artificial Sequence
  Passenger Sequence
cgacattatcagtctcaggaata

SEQ ID NO: 1660 - DNA, 21 bp, Artificial Sequence
  Passenger Sequence
acaagcttactgccacgcaat

SEQ ID NO: 1661 - DNA, 20 bp, Artificial Sequence
  Passenger Sequence
ccattctacttctgaatccc

SEQ ID NO: 1662 - DNA, 23 bp, Artificial Sequence
  Passenger Sequence
cgaagttctacttctgaacgcta

SEQ ID NO: 1663 - DNA, 23 bp, Artificial Sequence
  Passenger Sequence
ggaatatgttgcctacagcgcct

SEQ ID NO: 1664 - DNA, 20 bp, Artificial Sequence
  Passenger Sequence
agcgtttgttttgcaccacc

SEQ ID NO: 1665 - DNA, 22 bp, Artificial Sequence
  Passenger Sequence
acagcaattccgagaaactcct

SEQ ID NO: 1666 - DNA, 22 bp, Artificial Sequence
  Passenger Sequence
cagtgaatcaaaccaagaccga

SEQ ID NO: 1667 - DNA, 22 bp, Artificial Sequence
  Passenger Sequence
gactcagcatactcatgtttac

SEQ ID NO: 1668 - DNA, 22 bp, Artificial Sequence
  Passenger Sequence
cgacattatccgtctcagtatc

SEQ ID NO: 1669 - DNA, 22 bp, Artificial Sequence
  Passenger Sequence
cgaccagcttcctccacgtaac

SEQ ID NO: 1670 - DNA, 22 bp, Artificial Sequence
  Passenger Sequence
cacaaatcagcacattgttcaa

SEQ ID NO: 1671 - DNA, 22 bp, Artificial Sequence
  Passenger Sequence
ctgtgaatcacgccaagatatc

SEQ ID NO: 1672 - DNA, 22 bp, Artificial Sequence
  Passenger Sequence
cccacttcagagtgcaacccga

SEQ ID NO: 1673 - DNA, 23 bp, Artificial Sequence
  Passenger Sequence
tgccaaatcagccccttgcgtca

SEQ ID NO: 1674 - DNA, 22 bp, Artificial Sequence
  Passenger Sequence
actctatggataacctactaaa

SEQ ID NO: 1675 - DNA, 22 bp, Artificial Sequence
  Passenger Sequence
cccaaatcagcaccttgttaca

SEQ ID NO: 1676 - DNA, 20 bp, Artificial Sequence
  Passenger Sequence
cacacttcgattcaacccga

SEQ ID NO: 1677 - DNA, 22 bp, Artificial Sequence
  Passenger Sequence
ttcgatccatacttctcatgtc

SEQ ID NO: 1678 - DNA, 22 bp, Artificial Sequence
  Passenger Sequence
tcagcccaagacttctaatact

SEQ ID NO: 1679 - DNA, 22 bp, Artificial Sequence
  Passenger Sequence
cgaagttctaattctgaatctc

SEQ ID NO: 1680 - DNA, 20 bp, Artificial Sequence
  Passenger Sequence
cacttcagatttcaacccac

SEQ ID NO: 1681 - DNA, 23 bp, Artificial Sequence
  Passenger Sequence
attctatggatcaactaccgaaa

SEQ ID NO: 1682 - DNA, 22 bp, Artificial Sequence
  Passenger Sequence
ctgctaccagggctaaaatgat

SEQ ID NO: 1683 - DNA, 20 bp, Artificial Sequence
  Passenger Sequence
caatatgtgccacagtccta

SEQ ID NO: 1684 - DNA, 20 bp, Artificial Sequence
  Passenger Sequence
tccaatcagccccttgttac

SEQ ID NO: 1685 - DNA, 22 bp, Artificial Sequence
  Passenger Sequence
ccaagttctacctctgaataga

SEQ ID NO: 1686 - DNA, 22 bp, Artificial Sequence
  Passenger Sequence
tccagaccaaatattagttaat

SEQ ID NO: 1687 - DNA, 20 bp, Artificial Sequence
  Passenger Sequence
gcaatatgtgctacagtcct

SEQ ID NO: 1688 - DNA, 23 bp, Artificial Sequence
  Passenger Sequence
gatcagactttgttgtggcgaca

SEQ ID NO: 1689 - DNA, 20 bp, Artificial Sequence
  Passenger Sequence
cacaatatgttgcctacaag

SEQ ID NO: 1690 - DNA, 23 bp, Artificial Sequence
  Passenger Sequence
accctgtttgttttgcacgaaaa

SEQ ID NO: 1691 - DNA, 23 bp, Artificial Sequence
  Passenger Sequence
ctatatgttgcctacagtgacta

SEQ ID NO: 1692 - DNA, 22 bp, Artificial Sequence
  Passenger Sequence
ccaagtcctaattctgactctt

SEQ ID NO: 1693 - DNA, 23 bp, Artificial Sequence
  Passenger Sequence
ggcaagttctacttctgacctct

SEQ ID NO: 1694 - DNA, 22 bp, Artificial Sequence
  Passenger Sequence
caatatgttgcatacagtcaga

SEQ ID NO: 1695 - DNA, 22 bp, Artificial Sequence
  Passenger Sequence
tcccaactcatccccttattct

SEQ ID NO: 1696 - DNA, 22 bp, Artificial Sequence
  Passenger Sequence
attctatggagcaactattaac

SEQ ID NO: 1697 - DNA, 20 bp, Artificial Sequence
  Passenger Sequence
ccaagcttactccacgcacg

SEQ ID NO: 1698 - DNA, 22 bp, Artificial Sequence
  Passenger Sequence
taagtctcagcctactcatgta

SEQ ID NO: 1699 - DNA, 23 bp, Artificial Sequence
  Passenger Sequence
ttcgatccatccttctcagagtt

SEQ ID NO: 1700 - DNA, 20 bp, Artificial Sequence
  Passenger Sequence
ccacattacagctcagcata

SEQ ID NO: 1701 - DNA, 22 bp, Artificial Sequence
  Passenger Sequence
cagactttgttatggtacatgt

SEQ ID NO: 1702 - DNA, 22 bp, Artificial Sequence
  Passenger Sequence
tcccaaatcagacccttgtgaa

SEQ ID NO: 1703 - DNA, 20 bp, Artificial Sequence
  Passenger Sequence
gtcagcatcctcatgtctcg

SEQ ID NO: 1704 - DNA, 23 bp, Artificial Sequence
  Passenger Sequence
agacttcagatttcaaccgagaa

SEQ ID NO: 1705 - DNA, 23 bp, Artificial Sequence
  Passenger Sequence
gttccatccttctcacgtcgcaa

SEQ ID NO: 1706 - DNA, 20 bp, Artificial Sequence
  Passenger Sequence
cagactttttgggtacagtt

SEQ ID NO: 1707 - DNA, 22 bp, Artificial Sequence
  Passenger Sequence
ccagtgaatcacgccaagaact

SEQ ID NO: 1708 - DNA, 23 bp, Artificial Sequence
  Passenger Sequence
atcccacgttccttctctgaaga

SEQ ID NO: 1709 - DNA, 23 bp, Artificial Sequence
  Passenger Sequence
cagctatcagtgctaaagcggaa

SEQ ID NO: 1710 - DNA, 20 bp, Artificial Sequence
  Passenger Sequence
gcccttagaaggataactca

SEQ ID NO: 1711 - DNA, 138 bp, Artificial Sequence
  miR Cassette
catgcagactgcctgcttgggtgagccaaagccttctaccgacatatggacctgctaagctatgtagtagaaggctttggctgactcaggccgggacctcttccgccgcactgaggggcactccacaccacgggggcc

SEQ ID NO: 1712 - DNA, 138 bp, Artificial Sequence
  miR Cassette
gagctcagtcaaacctggatgccttttctgcaggcctctgtgtatgctgagactgataatgtggtgttatttaatccaccattatcagtctcagcaccctacagtgtcttgccctgtctccgggggttcctaataaag

SEQ ID NO: 1713 - DNA, 138 bp, Artificial Sequence
  miR Cassette
tcaagccatgcttcctgtgcccccagtggggccctggctccggtttgtttatgcaccaaaagtttgcgatgagacactttggtgcaaaacaaacaggagtccgggcacccccagctctggagcctgacaaggaggaca

SEQ ID NO: 1714 - DNA, 138 bp, Artificial Sequence
  miR Cassette
tcaagccatgcttcctgtgcccccagtggggccctggcttcgatggatcatactactaaaagtttgcgatgagacactttagtagttgatccatagaagtccgggcacccccagctctggagcctgacaaggaggaca

SEQ ID NO: 1715 - DNA, 138 bp, Artificial Sequence
  miR Cassette
catgcagactgcctgcttggggactcagcatcctcatgtgatattatggacctgctaagctaatagacatgaggatgctgagacctcaggccgggacctcttccgccgcactgaggggcactccacaccacgggggcc

SEQ ID NO: 1716 - DNA, 138 bp, Artificial Sequence
  miR Cassette
cccaaaagagagaagatattgaggcctgttgccacattgaacaaggggctgatttggggtattagtccgcccaaaccagacccttgctcattgtgtctgttaggcaatctcacggacctggggctttgcttatatgcc

SEQ ID NO: 1717 - DNA, 138 bp, Artificial Sequence
  miR Cassette
cccaaaagagagaagatattgaggcctgttgccacatttggtgcaaaacaaacaggctgtattagtccgagcctgcttggtttgcaacaattgtgtctgttaggcaatctcacggacctggggctttgcttatatgcc

SEQ ID NO: 1718 - DNA, 138 bp, Artificial Sequence
  miR Cassette
cccaaaagagagaagatattgaggcctgttgccacatcgggttgaaatctgaagtgtggtattagtccgcacactccagctttcaaaccgttgtgtctgttaggcaatctcacggacctggggctttgcttatatgcc

SEQ ID NO: 1719 - DNA, 138 bp, Artificial Sequence
  miR Cassette
cccaaaagagagaagatattgaggcctgttgccacaaggactgtaggcaacatattgcgtattagtccggcaatacgtttcctacaatccatgtgtctgttaggcaatctcacggacctggggctttgcttatatgcc

SEQ ID NO: 1720 - DNA, 138 bp, Artificial Sequence
  miR Cassette
gagctcagtcaaacctggatgccttttctgcaggcgtctgtgactgatgtaagtatatgaaccatgttatttaatccatggcatatacttacatcaagctacagtctcttgccctgtctccgggggttcctaataaag

SEQ ID NO: 1721 - DNA, 138 bp, Artificial Sequence
  miR Cassette
gagctcagtcaaacctggatgccttttctgcaggcctctgtgttgaacaaggggctgatttgggtgttatttaatccacccatcagccccttgttcccctacagtgtcttgccctgtctccgggggttcctaataaag

SEQ ID NO: 1722 - DNA, 138 bp, Artificial Sequence
  miR Cassette
gcagggccggcatgcctctgctgctggccacgcaaatcagacccttgttcacctgtctgcacctgtcactagttgaacaaggggctgatttgggtggccgtgtagtgctacccagcgctggctgcctcctcagcattg

SEQ ID NO: 1723 - DNA, 138 bp, Artificial Sequence
  miR Cassette
catgcagactgcctgcttgggctcacttcagatttcaacgacgatatggacctgctaagctatcgggttgaaatctgaagtgtgctcaggccgggacctcttccgccgcactgaggggcactccacaccacgggggcc

SEQ ID NO: 1724 - DNA, 138 bp, Artificial Sequence
  miR Cassette
cccaaaagagagaagatattgatgcctgttgccacattgaacaaggggctgatttggggtattagtccgcccaaaccagacccttgctcattgtgtctgttaggctattccacggacctggggctttgcttatatgcc

SEQ ID NO: 1725 - DNA, 138 bp, Artificial Sequence
  miR Cassette
ggctacagagtttgcttagcagagctgtcgggttgaaatctgaagtgtgtgtctaaactatcacacttcagacttcaaccatatagctactgctaggccatccttccctcgataaatgtcttggcatcgtttgctttg

SEQ ID NO: 1726 - DNA, 138 bp, Artificial Sequence
  miR Cassette
catgcagactgcctgcttgggctcacttcagatttcaacgacgatatggacctgctaagctatcgggttgaaatctgaagtgtgctcaggccgggacctctctcgccgcactgaggggcactccacaccacgggggcc

SEQ ID NO: 1727 - DNA, 138 bp, Artificial Sequence
  miR Cassette
catgcagactgcctgcttgggcgcaaatcagccccttgtcgcaatatggacctgctaagctattgaacaaggggctgatttgggctcaggccgggacctcttccgccgcactgaggggcactccacaccacgggggcc

SEQ ID NO: 1728 - DNA, 138 bp, Artificial Sequence
  miR Cassette
gcagggccggcatgcctctgctgctggccactcacttcagctttcaattcgcctgtctgcacctgtcactagtcgggttgaaatctgaagtgtgtggccgtgtagtgctacccagcgctggctgcctcctcagcattg

SEQ ID NO: 1729 - DNA, 138 bp, Artificial Sequence
  miR Cassette
cccaaaagagagaagatattgatgcctgttgccacaaggactgtaggcaacatattgcgtattagtccggcaatacgtttcctacaatccatgtgtctgttaggctattccacggacctggggctttgcttatatgcc

SEQ ID NO: 1730 - DNA, 138 bp, Artificial Sequence
  miR Cassette
gcagggccggcatgcctctgctgctggccatgccaaatcatccccttgttccctgtctgcacctgtcactagtgaacaaggggctgatttgggatggccgtgtagtgctacccagcgctggctgcctcctcagcattg

SEQ ID NO: 1731 - DNA, 138 bp, Artificial Sequence
  miR Cassette
catgcagactgcctgcttgggtgtcagccaaagccttctccctatatggacctgctaagctatagtagaaggctttggctgagactcaggccgggacctctctcgccgcactgaggggcactccacaccacgggggcc

SEQ ID NO: 1732 - DNA, 138 bp, Artificial Sequence
  miR Cassette
catgcagactgcctgcttgggtgagtctcagcatcctcacggtatatggacctgctaagctatacatgaggatgctgagactgactcaggccgggacctctctcgccgcactgaggggcactccacaccacgggggcc

SEQ ID NO: 1733 - DNA, 138 bp, Artificial Sequence
  miR Cassette
gagctcagtcaaacctggatgccttttctgcaggcgtctgtgttgaacaaggggctgatttgggtgttatttaatccacccatcagccccttgttcccctacagtctcttgccctgtctccgggggttcctaataaag

SEQ ID NO: 1734 - DNA, 138 bp, Artificial Sequence
  miR Cassette
ctggaggcttgctttgggctgtatgctgttgaacaaggggctgatttgggttttggcctctgactgacccaaatcgcccttgttcaacaggacaaggccctttatcagcactcacatggaacaaatggccaccgtggg

SEQ ID NO: 1735 - DNA, 138 bp, Artificial Sequence
  miR Cassette
catgcagactgcctgcttgggcgcaaatcagccccttgtcgcaatatggacctgctaagctattgaacaaggggctgatttgggctcaggccgggacctctctcgccgcactgaggggcactccacaccacgggggcc

SEQ ID NO: 1736 - DNA, 138 bp, Artificial Sequence
  miR Cassette
ctggaggcttgctttgggctgtatgctgtagattcagaagtagaacttggttttggcctctgactgaccaagttcactctgaatctacaggacaaggccctttatcagcactcacatggaacaaatggccaccgtggg

SEQ ID NO: 1737 - DNA, 138 bp, Artificial Sequence
  miR Cassette
catgcagactgcctgcttggggactcagcatcctcatgtgatattatggacctgctaagctaatagacatgaggatgctgagacctcaggccgggacctctctcgccgcactgaggggcactccacaccacgggggcc

SEQ ID NO: 1738 - DNA, 138 bp, Artificial Sequence
  miR Cassette
gagctcagtcaaacctggatgccttttctgcaggcctctgtgactggaatttctctgaactgcttgttatttaatccaagcttcagagaaattccaagctacagtgtcttgccctgtctccgggggttcctaataaag

SEQ ID NO: 1739 - DNA, 138 bp, Artificial Sequence
  miR Cassette
ggctacagagtttccttagcagagctgaggatgctgagactgataatgttgtctaaactatacattatcagtatcagcataattagctactgctaggcaatccttccctcgataaatgtcttggcatcgtttgctttg

SEQ ID NO: 1740 - DNA, 138 bp, Artificial Sequence
  miR Cassette
cccaaaagagagaagatattgatgcctgttgccacatatgtcttggcttgattcactggtattagtccgcagtgactcacgccaagccatttgtgtctgttaggctattccacggacctggggctttgcttatatgcc

SEQ ID NO: 1741 - DNA, 138 bp, Artificial Sequence
  miR Cassette
ggctacagagtttccttagcagagctgatagacatgaggatgctgagactgtctaaactatgtctcagcatcatcatgtcgcttagctactgctaggcaatccttccctcgataaatgtcttggcatcgtttgctttg

SEQ ID NO: 1742 - DNA, 138 bp, Artificial Sequence
  miR Cassette
gccgtccgcgcgccccgcccccgcgtctccaggggcctcagcatcataatgtctatctgtgggaactggaggatagacatgaggatgctgagacccccgcagcacgcccacgcgccgcgccacgccgcgccccgagcc

SEQ ID NO: 1743 - DNA, 138 bp, Artificial Sequence
  miR Cassette
catgcagactgcctgcttgggcgacattatcagtctcaggaatatatggacctgctaagctatatgctgagactgataatgtggctcaggccgggacctcttccgccgcactgaggggcactccacaccacgggggcc

SEQ ID NO: 1744 - DNA, 138 bp, Artificial Sequence
  miR Cassette
tcaagccatgcttcctgtgcccccagtggggccctggctacaagcttactgccacgcaatagtttgcgatgagacacattgcgtggagtaagctggtagtccgggcacccccagctctggagcctgacaaggaggaca

SEQ ID NO: 1745 - DNA, 138 bp, Artificial Sequence
  miR Cassette
cccaaaagagagaagatattgatgcctgttgccacatcgggttgaaatctgaagtgtggtattagtccgcacactccagctttcaaaccgttgtgtctgttaggctattccacggacctggggctttgcttatatgcc

SEQ ID NO: 1746 - DNA, 138 bp, Artificial Sequence
  miR Cassette
gagctcagtcaaacctggatgccttttctgcaggcgtctgtgtagattcagaagtagaacttggtgttatttaatccaccattctacttctgaatcccctacagtctcttgccctgtctccgggggttcctaataaag

SEQ ID NO: 1747 - DNA, 138 bp, Artificial Sequence
  miR Cassette
catgcagactgcctgcttgggcgaagttctacttctgaacgctatatggacctgctaagctatagattcagaagtagaacttggctcaggccgggacctcttccgccgcactgaggggcactccacaccacgggggcc

SEQ ID NO: 1748 - DNA, 138 bp, Artificial Sequence
  miR Cassette
catgcagactgcctgcttgggggaatatgttgcctacagcgccttatggacctgctaagctaaggactgtaggcaacatattgcctcaggccgggacctcttccgccgcactgaggggcactccacaccacgggggcc

SEQ ID NO: 1749 - DNA, 138 bp, Artificial Sequence
  miR Cassette
catgcagactgcctgcttgggtgtcagccaaagccttctccctatatggacctgctaagctatagtagaaggctttggctgagactcaggccgggacctcttccgccgcactgaggggcactccacaccacgggggcc

SEQ ID NO: 1750 - DNA, 138 bp, Artificial Sequence
  miR Cassette
gagctcagtcaaacctggatgccttttctgcaggcgtctgtgtttggtgcaaaacaaacaggcttgttatttaatccaagcgtttgttttgcaccaccctacagtctcttgccctgtctccgggggttcctaataaag

SEQ ID NO: 1751 - DNA, 138 bp, Artificial Sequence
  miR Cassette
cccaaaagagagaagatattgaggcctgttgccacatggaatttctctgaactgctgtgtattagtccgacagcaattccgagaaactccttgtgtctgttaggcaatctcacggacctggggctttgcttatatgcc

SEQ ID NO: 1752 - DNA, 138 bp, Artificial Sequence
  miR Cassette
ggctacagagtttgcttagcagagctgtatgtcttggcttgattcactgtgtctaaactatcagtgaatcaaaccaagaccgatagctactgctaggccatccttccctcgataaatgtcttggcatcgtttgctttg

SEQ ID NO: 1753 - DNA, 138 bp, Artificial Sequence
  miR Cassette
gcagggccggcatgcctctgctgctggccagactcagcatactcatgtttacctgtctgcacctgtcactagatagacatgaggatgctgagactggccgtgtagtgctacccagcgctggctgcctcctcagcattg

SEQ ID NO: 1754 - DNA, 138 bp, Artificial Sequence
  miR Cassette
gcagggccggcatgcctctgctgctggccacgacattatccgtctcagtatcctgtctgcacctgtcactagtatgctgagactgataatgtggtggccgtgtagtgctacccagcgctggctgcctcctcagcattg

SEQ ID NO: 1755 - DNA, 138 bp, Artificial Sequence
  miR Cassette
gcagggccggcatgcctctgctgctggccacgaccagcttcctccacgtaacctgtctgcacctgtcactagattgcgtggagtaagctggtggtggccgtgtagtgctacccagcgctggctgcctcctcagcattg

SEQ ID NO: 1756 - DNA, 138 bp, Artificial Sequence
  miR Cassette
gccgtccgcgcgccccgcccccgcgtctccagggcacaaatcagcacattgttcaactgtgggaactggaggttgaacaaggggctgatttgggccccgcagcacgcccacgcgccgcgccacgccgcgccccgagcc

SEQ ID NO: 1757 - DNA, 138 bp, Artificial Sequence
  miR Cassette
gcagggccggcatgcctctgctgctggccactgtgaatcacgccaagatatcctgtctgcacctgtcactagtatgtcttggcttgattcactgtggccgtgtagtgctacccagcgctggctgcctcctcagcattg

SEQ ID NO: 1758 - DNA, 138 bp, Artificial Sequence
  miR Cassette
cctggaggcttgctgaaggctgtatgctgttgaacaaggggctgatttgggttttggccactgactgacccaaatcgcccttgttcaacaggacacaaggcctgttactagcactcacatggaacaaatggccaccgg

SEQ ID NO: 1759 - DNA, 138 bp, Artificial Sequence
  miR Cassette
cctggaggcttgctgaaggctgtatgctgtagattcagaagtagaacttggttttggccactgactgaccaagttcactctgaatctacaggacacaaggcctgttactagcactcacatggaacaaatggccaccgg

SEQ ID NO: 1760 - DNA, 138 bp, Artificial Sequence
  miR Cassette
ggctacagagtttccttagcagagctgtcgggttgaaatctgaagtgtgtgtctaaactatcacacttcagacttcaaccatatagctactgctaggcaatccttccctcgataaatgtcttggcatcgtttgctttg

SEQ ID NO: 1761 - DNA, 138 bp, Artificial Sequence
  miR Cassette
catgcagactgcctgcttgggtgagccaaagccttctaccgacatatggacctgctaagctatgtagtagaaggctttggctgactcaggccgggacctctctcgccgcactgaggggcactccacaccacgggggcc

SEQ ID NO: 1762 - DNA, 138 bp, Artificial Sequence
  miR Cassette
gccgtccgcgcgccccgcccccgcgtctccagggcccacttcagagtgcaacccgactgtgggaactggaggtcgggttgaaatctgaagtgtgccccgcagcacgcccacgcgccgcgccacgccgcgccccgagcc

SEQ ID NO: 1763 - DNA, 138 bp, Artificial Sequence
  miR Cassette
catgcagactgcctgcttgggtgccaaatcagccccttgcgtcatatggacctgctaagctatgaacaaggggctgatttgggactcaggccgggacctctctcgccgcactgaggggcactccacaccacgggggcc

SEQ ID NO: 1764 - DNA, 138 bp, Artificial Sequence
  miR Cassette
gccgtccgcgcgccccgcccccgcgtctccagggactctatggataacctactaaactgtgggaactggaggtttagtagttgatccatagattccccgcagcacgcccacgcgccgcgccacgccgcgccccgagcc

SEQ ID NO: 1765 - DNA, 138 bp, Artificial Sequence
  miR Cassette
ggctacagagtttgcttagcagagctgttgaacaaggggctgatttgggtgtctaaactatcccaaatcagcaccttgttacatagctactgctaggccatccttccctcgataaatgtcttggcatcgtttgctttg

SEQ ID NO: 1766 - DNA, 138 bp, Artificial Sequence
  miR Cassette
ctggaggcttgctttgggctgtatgctgtcgggttgaaatctgaagtgtgttttggcctctgactgacacacttcgattcaacccgacaggacaaggccctttatcagcactcacatggaacaaatggccaccgtggg

SEQ ID NO: 1767 - DNA, 138 bp, Artificial Sequence
  miR Cassette
gcagggccggcatgcctctgctgctggccattcgatccatacttctcatgtcctgtctgcacctgtcactagaacgtgagaaggatggatcgtatggccgtgtagtgctacccagcgctggctgcctcctcagcattg

SEQ ID NO: 1768 - DNA, 138 bp, Artificial Sequence
  miR Cassette
cccaaaagagagaagatattgaggcctgttgccacatgtagtagaaggctttggctgagtattagtccgtcagcccaagacttctaatacttgtgtctgttaggcaatctcacggacctggggctttgcttatatgcc

SEQ ID NO: 1769 - DNA, 138 bp, Artificial Sequence
  miR Cassette
gcagggccggcatgcctctgctgctggccacgaagttctaattctgaatctcctgtctgcacctgtcactagtagattcagaagtagaacttggtggccgtgtagtgctacccagcgctggctgcctcctcagcattg

SEQ ID NO: 1770 - DNA, 138 bp, Artificial Sequence
  miR Cassette
catgcagactgcctgcttgggtgccaaatcagccccttgcgtcatatggacctgctaagctatgaacaaggggctgatttgggactcaggccgggacctcttccgccgcactgaggggcactccacaccacgggggcc

SEQ ID NO: 1771 - DNA, 138 bp, Artificial Sequence
  miR Cassette
gagctcagtcaaacctggatgccttttctgcaggcctctgtgtcgggttgaaatctgaagtgtgtgttatttaatccacacttcagatttcaacccacctacagtgtcttgccctgtctccgggggttcctaataaag

SEQ ID NO: 1772 - DNA, 138 bp, Artificial Sequence
  miR Cassette
catgcagactgcctgcttgggattctatggatcaactaccgaaatatggacctgctaagctatttagtagttgatccatagattctcaggccgggacctcttccgccgcactgaggggcactccacaccacgggggcc

SEQ ID NO: 1773 - DNA, 138 bp, Artificial Sequence
  miR Cassette
cccaaaagagagaagatattgatgcctgttgccacattcactttagcactgatagcaggtattagtccgctgctaccagggctaaaatgattgtgtctgttaggctattccacggacctggggctttgcttatatgcc

SEQ ID NO: 1774 - DNA, 138 bp, Artificial Sequence
  miR Cassette
ctggaggcttgctttgggctgtatgctgtaggactgtaggcaacatattgttttggcctctgactgacaatatgtgccacagtcctacaggacaaggccctttatcagcactcacatggaacaaatggccaccgtggg

SEQ ID NO: 1775 - DNA, 138 bp, Artificial Sequence
  miR Cassette
gagctcagtcaaacctggatgccttttctgcaggcctctgtgtgaacaaggggctgatttgggatgttatttaatccatccaatcagccccttgttacctacagtgtcttgccctgtctccgggggttcctaataaag

SEQ ID NO: 1776 - DNA, 138 bp, Artificial Sequence
  miR Cassette
cccaaaagagagaagatattgatgcctgttgccacatttggtgcaaaacaaacaggctgtattagtccgagcctgcttggtttgcaacaattgtgtctgttaggctattccacggacctggggctttgcttatatgcc

SEQ ID NO: 1777 - DNA, 138 bp, Artificial Sequence
  miR Cassette
ggctacagagtttccttagcagagctgtagattcagaagtagaacttggtgtctaaactatccaagttctacctctgaatagatagctactgctaggcaatccttccctcgataaatgtcttggcatcgtttgctttg

SEQ ID NO: 1778 - DNA, 138 bp, Artificial Sequence
  miR Cassette
gagctcagtcaaacctggatgccttttctgcaggcgtctgtgtcgggttgaaatctgaagtgtgtgttatttaatccacacttcagatttcaacccacctacagtctcttgccctgtctccgggggttcctaataaag

SEQ ID NO: 1779 - DNA, 138 bp, Artificial Sequence
  miR Cassette
gccgtccgcgcgccccgcccccgcgtctccagggtccagaccaaatattagttaatctgtgggaactggaggattaactactctttggtctgaaccccgcagcacgcccacgcgccgcgccacgccgcgccccgagcc

SEQ ID NO: 1780 - DNA, 138 bp, Artificial Sequence
  miR Cassette
ctggaggcttgctttgggctgtatgctgaggactgtaggcaacatattgcttttggcctctgactgagcaatatgtgctacagtcctcaggacaaggccctttatcagcactcacatggaacaaatggccaccgtggg

SEQ ID NO: 1781 - DNA, 138 bp, Artificial Sequence
  miR Cassette
catgcagactgcctgcttggggatcagactttgttgtggcgacatatggacctgctaagctatgtaccacaacaaagtctgaacctcaggccgggacctcttccgccgcactgaggggcactccacaccacgggggcc

SEQ ID NO: 1782 - DNA, 138 bp, Artificial Sequence
  miR Cassette
gagctcagtcaaacctggatgccttttctgcaggcgtctgtgactgtaggcaacatattgcgtgtgttatttaatccacacaatatgttgcctacaagctacagtctcttgccctgtctccgggggttcctaataaag

SEQ ID NO: 1783 - DNA, 138 bp, Artificial Sequence
  miR Cassette
catgcagactgcctgcttgggaccctgtttgttttgcacgaaaatatggacctgctaagctatttggtgcaaaacaaacaggctctcaggccgggacctctctcgccgcactgaggggcactccacaccacgggggcc

SEQ ID NO: 1784 - DNA, 138 bp, Artificial Sequence
  miR Cassette
catgcagactgcctgcttgggctatatgttgcctacagtgactatatggacctgctaagctataggactgtaggcaacatattgctcaggccgggacctctctcgccgcactgaggggcactccacaccacgggggcc

SEQ ID NO: 1785 - DNA, 138 bp, Artificial Sequence
  miR Cassette
cccaaaagagagaagatattgaggcctgttgccacatagattcagaagtagaacttgggtattagtccgccaagtcctaattctgactctttgtgtctgttaggcaatctcacggacctggggctttgcttatatgcc

SEQ ID NO: 1786 - DNA, 138 bp, Artificial Sequence
  miR Cassette
catgcagactgcctgcttgggggcaagttctacttctgacctcttatggacctgctaagctaagattcagaagtagaacttggcctcaggccgggacctcttccgccgcactgaggggcactccacaccacgggggcc

SEQ ID NO: 1787 - DNA, 138 bp, Artificial Sequence
  miR Cassette
ggctacagagtttccttagcagagctgtaggactgtaggcaacatattgtgtctaaactatcaatatgttgcatacagtcagatagctactgctaggcaatccttccctcgataaatgtcttggcatcgtttgctttg

SEQ ID NO: 1788 - DNA, 138 bp, Artificial Sequence
  miR Cassette
cccaaaagagagaagatattgatgcctgttgccacatgaacaaggggctgatttgggagtattagtccgtcccaactcatccccttattcttgtgtctgttaggctattccacggacctggggctttgcttatatgcc

SEQ ID NO: 1789 - DNA, 138 bp, Artificial Sequence
  miR Cassette
gcagggccggcatgcctctgctgctggccaattctatggagcaactattaacctgtctgcacctgtcactagtttagtagttgatccatagatttggccgtgtagtgctacccagcgctggctgcctcctcagcattg

SEQ ID NO: 1790 - DNA, 138 bp, Artificial Sequence
  miR Cassette
gagctcagtcaaacctggatgccttttctgcaggcgtctgtgattgcgtggagtaagctggtggtgttatttaatccaccaagcttactccacgcacgctacagtctcttgccctgtctccgggggttcctaataaag

SEQ ID NO: 1791 - DNA, 138 bp, Artificial Sequence
  miR Cassette
gccgtccgcgcgccccgcccccgcgtctccagggtaagtctcagcctactcatgtactgtgggaactggaggtacatgaggatgctgagactgaccccgcagcacgcccacgcgccgcgccacgccgcgccccgagcc

SEQ ID NO: 1792 - DNA, 138 bp, Artificial Sequence
  miR Cassette
catgcagactgcctgcttgggttcgatccatccttctcagagtttatggacctgctaagctaaacgtgagaaggatggatcgtactcaggccgggacctctctcgccgcactgaggggcactccacaccacgggggcc

SEQ ID NO: 1793 - DNA, 138 bp, Artificial Sequence
  miR Cassette
ctggaggcttgctttgggctgtatgctgtatgctgagactgataatgtggttttggcctctgactgaccacattacagctcagcatacaggacaaggccctttatcagcactcacatggaacaaatggccaccgtggg

SEQ ID NO: 1794 - DNA, 138 bp, Artificial Sequence
  miR Cassette
ggctacagagtttccttagcagagctgaactgtaccacaacaaagtctgtgtctaaactatcagactttgttatggtacatgttagctactgctaggcaatccttccctcgataaatgtcttggcatcgtttgctttg

SEQ ID NO: 1795 - DNA, 138 bp, Artificial Sequence
  miR Cassette
ggctacagagtttgcttagcagagctgtgaacaaggggctgatttgggatgtctaaactattcccaaatcagacccttgtgaatagctactgctaggccatccttccctcgataaatgtcttggcatcgtttgctttg

SEQ ID NO: 1796 - DNA, 138 bp, Artificial Sequence
  miR Cassette
gagctcagtcaaacctggatgccttttctgcaggcgtctgtgatagacatgaggatgctgagactgttatttaatccagtcagcatcctcatgtctcgctacagtctcttgccctgtctccgggggttcctaataaag

SEQ ID NO: 1797 - DNA, 138 bp, Artificial Sequence
  miR Cassette
cccaaaagagagaagatattgatgcctgttgccacatgtagtagaaggctttggctgagtattagtccgtcagcccaagacttctaatacttgtgtctgttaggctattccacggacctggggctttgcttatatgcc

SEQ ID NO: 1798 - DNA, 138 bp, Artificial Sequence
  miR Cassette
catgcagactgcctgcttgggagacttcagatttcaaccgagaatatggacctgctaagctattcgggttgaaatctgaagtgtctcaggccgggacctcttccgccgcactgaggggcactccacaccacgggggcc

SEQ ID NO: 1799 - DNA, 138 bp, Artificial Sequence
  miR Cassette
catgcagactgcctgcttggggttccatccttctcacgtcgcaatatggacctgctaagctattgaacgtgagaaggatggatcctcaggccgggacctcttccgccgcactgaggggcactccacaccacgggggcc

SEQ ID NO: 1800 - DNA, 138 bp, Artificial Sequence
  miR Cassette
gagctcagtcaaacctggatgccttttctgcaggcctctgtgtttggtgcaaaacaaacaggcttgttatttaatccaagcgtttgttttgcaccaccctacagtgtcttgccctgtctccgggggttcctaataaag

SEQ ID NO: 1801 - DNA, 138 bp, Artificial Sequence
  miR Cassette
ctggaggcttgctttgggctgtatgctgaactgtaccacaacaaagtctgttttggcctctgactgacagactttttgggtacagttcaggacaaggccctttatcagcactcacatggaacaaatggccaccgtggg

SEQ ID NO: 1802 - DNA, 138 bp, Artificial Sequence
  miR Cassette
catgcagactgcctgcttgggctatatgttgcctacagtgactatatggacctgctaagctataggactgtaggcaacatattgctcaggccgggacctcttccgccgcactgaggggcactccacaccacgggggcc

SEQ ID NO: 1803 - DNA, 138 bp, Artificial Sequence
  miR Cassette
gagctcagtcaaacctggatgccttttctgcaggcctctgtgtagattcagaagtagaacttggtgttatttaatccaccattctacttctgaatcccctacagtgtcttgccctgtctccgggggttcctaataaag

SEQ ID NO: 1804 - DNA, 138 bp, Artificial Sequence
  miR Cassette
ggctacagagtttgcttagcagagctgatgtcttggcttgattcactggtgtctaaactatccagtgaatcacgccaagaacttagctactgctaggccatccttccctcgataaatgtcttggcatcgtttgctttg

SEQ ID NO: 1805 - DNA, 138 bp, Artificial Sequence
  miR Cassette
catgcagactgcctgcttgggttcgatccatccttctcagagtttatggacctgctaagctaaacgtgagaaggatggatcgtactcaggccgggacctcttccgccgcactgaggggcactccacaccacgggggcc

SEQ ID NO: 1806 - DNA, 138 bp, Artificial Sequence
  miR Cassette
catgcagactgcctgcttgggatcccacgttccttctctgaagatatggacctgctaagctatctgagagaaggaacgtgggttctcaggccgggacctctctcgccgcactgaggggcactccacaccacgggggcc

SEQ ID NO: 1807 - DNA, 138 bp, Artificial Sequence
  miR Cassette
catgcagactgcctgcttgggcagctatcagtgctaaagcggaatatggacctgctaagctattcactttagcactgatagcagctcaggccgggacctcttccgccgcactgaggggcactccacaccacgggggcc

SEQ ID NO: 1808 - DNA, 138 bp, Artificial Sequence
  miR Cassette
cccaaaagagagaagatattgatgcctgttgccacatggaatttctctgaactgctgtgtattagtccgacagcaattccgagaaactccttgtgtctgttaggctattccacggacctggggctttgcttatatgcc

SEQ ID NO: 1809 - DNA, 138 bp, Artificial Sequence
  miR Cassette
gagctcagtcaaacctggatgccttttctgcaggcctctgtgactgatgtaagtatatgaaccatgttatttaatccatggcatatacttacatcaagctacagtgtcttgccctgtctccgggggttcctaataaag

SEQ ID NO: 1810 - DNA, 138 bp, Artificial Sequence
  miR Cassette
cctggaggcttgctgaaggctgtatgctgtgagttatctctttctaagggcttttggccactgactgagcccttagaaggataactcacaggacacaaggcctgttactagcactcacatggaacaaatggccaccgg

SEQ ID NO: 1811 - RNA, 22 nt, Artificial Sequence
  Guide Sequence
uaugcugagacugauaaugugg

SEQ ID NO: 1812 - RNA, 22 nt, Artificial Sequence
  Guide Sequence
uuuggugcaaaacaaacaggcu

SEQ ID NO: 1813 - RNA, 22 nt, Artificial Sequence
  Guide Sequence
auagacaugaggaugcugagac

SEQ ID NO: 1814 - RNA, 22 nt, Artificial Sequence
  Guide Sequence
aggacuguaggcaacauauugc

SEQ ID NO: 1815 - RNA, 22 nt, Artificial Sequence
  Guide Sequence
acugauguaaguauaugaacca

SEQ ID NO: 1816 - RNA, 22 nt, Artificial Sequence
  Guide Sequence
uagauucagaaguagaacuugg

SEQ ID NO: 1817 - RNA, 22 nt, Artificial Sequence
  Guide Sequence
acuggaauuucucugaacugcu

SEQ ID NO: 1818 - RNA, 22 nt, Artificial Sequence
  Guide Sequence
aggaugcugagacugauaaugu

SEQ ID NO: 1819 - RNA, 22 nt, Artificial Sequence
  Guide Sequence
uaugucuuggcuugauucacug

SEQ ID NO: 1820 - RNA, 22 nt, Artificial Sequence
  Guide Sequence
uggaauuucucugaacugcugu

SEQ ID NO: 1821 - RNA, 22 nt, Artificial Sequence
  Guide Sequence
uaggacuguaggcaacauauug

SEQ ID NO: 1822 - RNA, 22 nt, Artificial Sequence
  Guide Sequence
acuguaggcaacauauugcgug

SEQ ID NO: 1823 - RNA, 22 nt, Artificial Sequence
  Guide Sequence
agauucagaaguagaacuuggc

SEQ ID NO: 1824 - RNA, 22 nt, Artificial Sequence
  Guide Sequence
aacgugagaaggauggaucgua

SEQ ID NO: 1825 - RNA, 22 nt, Artificial Sequence
  Guide Sequence
uucacuuuagcacugauagcag

SEQ ID NO: 1826 - RNA, 22 nt, Artificial Sequence
  Guide Sequence
augucuuggcuugauucacugg

SEQ ID NO: 1827 - RNA, 22 nt, Artificial Sequence
  Guide Sequence
ugaguuaucucuuucuaagggc

SEQ ID NO: 1828 - RNA, 23 nt, Artificial Sequence
  Passenger Sequence
ugagccaaagccuucuaccgaca

SEQ ID NO: 1829 - RNA, 20 nt, Artificial Sequence
  Passenger Sequence
ccauuaucagucucagcacc

SEQ ID NO: 1830 - RNA, 21 nt, Artificial Sequence
  Passenger Sequence
ccgguuuguuuaugcaccaaa

SEQ ID NO: 1831 - RNA, 21 nt, Artificial Sequence
  Passenger Sequence
ucgauggaucauacuacuaaa

SEQ ID NO: 1832 - RNA, 23 nt, Artificial Sequence
  Passenger Sequence
gacucagcauccucaugugauau

SEQ ID NO: 1833 - RNA, 22 nt, Artificial Sequence
  Passenger Sequence
cccaaaccagacccuugcucau

SEQ ID NO: 1834 - RNA, 22 nt, Artificial Sequence
  Passenger Sequence
agccugcuugguuugcaacaau

SEQ ID NO: 1835 - RNA, 22 nt, Artificial Sequence
  Passenger Sequence
cacacuccagcuuucaaaccgu

SEQ ID NO: 1836 - RNA, 22 nt, Artificial Sequence
  Passenger Sequence
gcaauacguuuccuacaaucca

SEQ ID NO: 1837 - RNA, 20 nt, Artificial Sequence
  Passenger Sequence
uggcauauacuuacaucaag

SEQ ID NO: 1838 - RNA, 20 nt, Artificial Sequence
  Passenger Sequence
cccaucagccccuuguuccc

SEQ ID NO: 1839 - RNA, 22 nt, Artificial Sequence
  Passenger Sequence
cgcaaaucagacccuuguucac

SEQ ID NO: 1840 - RNA, 23 nt, Artificial Sequence
  Passenger Sequence
cucacuucagauuucaacgacga

SEQ ID NO: 1841 - RNA, 22 nt, Artificial Sequence
  Passenger Sequence
cacacuucagacuucaaccaua

SEQ ID NO: 1842 - RNA, 23 nt, Artificial Sequence
  Passenger Sequence
cgcaaaucagccccuugucgcaa

SEQ ID NO: 1843 - RNA, 22 nt, Artificial Sequence
  Passenger Sequence
cucacuucagcuuucaauucgc

SEQ ID NO: 1844 - RNA, 22 nt, Artificial Sequence
  Passenger Sequence
ugccaaaucauccccuuguucc

SEQ ID NO: 1845 - RNA, 23 nt, Artificial Sequence
  Passenger Sequence
ugucagccaaagccuucucccua

SEQ ID NO: 1846 - RNA, 23 nt, Artificial Sequence
  Passenger Sequence
ugagucucagcauccucacggua

SEQ ID NO: 1847 - RNA, 20 nt, Artificial Sequence
  Passenger Sequence
cccaaaucgcccuuguucaa

SEQ ID NO: 1848 - RNA, 20 nt, Artificial Sequence
  Passenger Sequence
ccaaguucacucugaaucua

SEQ ID NO: 1849 - RNA, 20 nt, Artificial Sequence
  Passenger Sequence
agcuucagagaaauuccaag

SEQ ID NO: 1850 - RNA, 22 nt, Artificial Sequence
  Passenger Sequence
acauuaucaguaucagcauaau

SEQ ID NO: 1851 - RNA, 22 nt, Artificial Sequence
  Passenger Sequence
cagugacucacgccaagccauu

SEQ ID NO: 1852 - RNA, 22 nt, Artificial Sequence
  Passenger Sequence
gucucagcaucaucaugucgcu

SEQ ID NO: 1853 - RNA, 22 nt, Artificial Sequence
  Passenger Sequence
gccucagcaucauaaugucuau

SEQ ID NO: 1854 - RNA, 23 nt, Artificial Sequence
  Passenger Sequence
cgacauuaucagucucaggaaua

SEQ ID NO: 1855 - RNA, 21 nt, Artificial Sequence
  Passenger Sequence
acaagcuuacugccacgcaau

SEQ ID NO: 1856 - RNA, 20 nt, Artificial Sequence
  Passenger Sequence
ccauucuacuucugaauccc

SEQ ID NO: 1857 - RNA, 23 nt, Artificial Sequence
  Passenger Sequence
cgaaguucuacuucugaacgcua

SEQ ID NO: 1858 - RNA, 23 nt, Artificial Sequence
  Passenger Sequence
ggaauauguugccuacagcgccu

SEQ ID NO: 1859 - RNA, 20 nt, Artificial Sequence
  Passenger Sequence
agcguuuguuuugcaccacc

SEQ ID NO: 1860 - RNA, 22 nt, Artificial Sequence
  Passenger Sequence
acagcaauuccgagaaacuccu

SEQ ID NO: 1861 - RNA, 22 nt, Artificial Sequence
  Passenger Sequence
cagugaaucaaaccaagaccga

SEQ ID NO: 1862 - RNA, 22 nt, Artificial Sequence
  Passenger Sequence
gacucagcauacucauguuuac

SEQ ID NO: 1863 - RNA, 22 nt, Artificial Sequence
  Passenger Sequence
cgacauuauccgucucaguauc

SEQ ID NO: 1864 - RNA, 22 nt, Artificial Sequence
  Passenger Sequence
cgaccagcuuccuccacguaac

SEQ ID NO: 1865 - RNA, 22 nt, Artificial Sequence
  Passenger Sequence
cacaaaucagcacauuguucaa

SEQ ID NO: 1866 - RNA, 22 nt, Artificial Sequence
  Passenger Sequence
cugugaaucacgccaagauauc

SEQ ID NO: 1867 - RNA, 22 nt, Artificial Sequence
  Passenger Sequence
cccacuucagagugcaacccga

SEQ ID NO: 1868 - RNA, 23 nt, Artificial Sequence
  Passenger Sequence
ugccaaaucagccccuugcguca

SEQ ID NO: 1869 - RNA, 22 nt, Artificial Sequence
  Passenger Sequence
acucuauggauaaccuacuaaa

SEQ ID NO: 1870 - RNA, 22 nt, Artificial Sequence
  Passenger Sequence
cccaaaucagcaccuuguuaca

SEQ ID NO: 1871 - RNA, 20 nt, Artificial Sequence
  Passenger Sequence
cacacuucgauucaacccga

SEQ ID NO: 1872 - RNA, 22 nt, Artificial Sequence
  Passenger Sequence
uucgauccauacuucucauguc

SEQ ID NO: 1873 - RNA, 22 nt, Artificial Sequence
  Passenger Sequence
ucagcccaagacuucuaauacu

SEQ ID NO: 1874 - RNA, 22 nt, Artificial Sequence
  Passenger Sequence
cgaaguucuaauucugaaucuc

SEQ ID NO: 1875 - RNA, 20 nt, Artificial Sequence
  Passenger Sequence
cacuucagauuucaacccac

SEQ ID NO: 1876 - RNA, 23 nt, Artificial Sequence
  Passenger Sequence
auucuauggaucaacuaccgaaa

SEQ ID NO: 1877 - RNA, 22 nt, Artificial Sequence
  Passenger Sequence
cugcuaccagggcuaaaaugau

SEQ ID NO: 1878 - RNA, 20 nt, Artificial Sequence
  Passenger Sequence
caauaugugccacaguccua

SEQ ID NO: 1879 - RNA, 20 nt, Artificial Sequence
  Passenger Sequence
uccaaucagccccuuguuac

SEQ ID NO: 1880 - RNA, 22 nt, Artificial Sequence
  Passenger Sequence
ccaaguucuaccucugaauaga

SEQ ID NO: 1881 - RNA, 22 nt, Artificial Sequence
  Passenger Sequence
uccagaccaaauauuaguuaau

SEQ ID NO: 1882 - RNA, 20 nt, Artificial Sequence
  Passenger Sequence
gcaauaugugcuacaguccu

SEQ ID NO: 1883 - RNA, 23 nt, Artificial Sequence
  Passenger Sequence
gaucagacuuuguuguggcgaca

SEQ ID NO: 1884 - RNA, 20 nt, Artificial Sequence
  Passenger Sequence
cacaauauguugccuacaag

SEQ ID NO: 1885 - RNA, 23 nt, Artificial Sequence
  Passenger Sequence
acccuguuuguuuugcacgaaaa

SEQ ID NO: 1886 - RNA, 23 nt, Artificial Sequence
  Passenger Sequence
cuauauguugccuacagugacua

SEQ ID NO: 1887 - RNA, 22 nt, Artificial Sequence
  Passenger Sequence
ccaaguccuaauucugacucuu

SEQ ID NO: 1888 - RNA, 23 nt, Artificial Sequence
  Passenger Sequence
ggcaaguucuacuucugaccucu

SEQ ID NO: 1889 - RNA, 22 nt, Artificial Sequence
  Passenger Sequence
caauauguugcauacagucaga

SEQ ID NO: 1890 - RNA, 22 nt, Artificial Sequence
  Passenger Sequence
ucccaacucauccccuuauucu

SEQ ID NO: 1891 - RNA, 22 nt, Artificial Sequence
  Passenger Sequence
auucuauggagcaacuauuaac

SEQ ID NO: 1892 - RNA, 20 nt, Artificial Sequence
  Passenger Sequence
ccaagcuuacuccacgcacg

SEQ ID NO: 1893 - RNA, 22 nt, Artificial Sequence
  Passenger Sequence
uaagucucagccuacucaugua

SEQ ID NO: 1894 - RNA, 23 nt, Artificial Sequence
  Passenger Sequence
uucgauccauccuucucagaguu

SEQ ID NO: 1895 - RNA, 20 nt, Artificial Sequence
  Passenger Sequence
ccacauuacagcucagcaua

SEQ ID NO: 1896 - RNA, 22 nt, Artificial Sequence
  Passenger Sequence
cagacuuuguuaugguacaugu

SEQ ID NO: 1897 - RNA, 22 nt, Artificial Sequence
  Passenger Sequence
ucccaaaucagacccuugugaa

SEQ ID NO: 1898 - RNA, 20 nt, Artificial Sequence
  Passenger Sequence
gucagcauccucaugucucg

SEQ ID NO: 1899 - RNA, 20 nt, Artificial Sequence
  Passenger Sequence
gccuagaaagagauaacuac

SEQ ID NO: 1900 - RNA, 20 nt, Artificial Sequence
  Passenger Sequence
gcccuuagaaggauaacuca

SEQ ID NO: 1901 - DNA, 20 bp, Artificial Sequence
  Passenger Sequence
acgctcatgttgcctacaga

SEQ ID NO: 1902 - RNA, 23 nt, Artificial Sequence
  Passenger Sequence
aucccacguuccuucucugaaga

SEQ ID NO: 1903 - RNA, 23 nt, Artificial Sequence
  Passenger Sequence
cagcuaucagugcuaaagcggaa

SEQ ID NO: 1904 - RNA, 22 nt, Artificial Sequence
  Passenger Sequence
ccagugaaucacgccaagaacu

SEQ ID NO: 1905 - RNA, 20 nt, Artificial Sequence
  Passenger Sequence
cagacuuuuuggguacaguu

SEQ ID NO: 1906 - RNA, 23 nt, Artificial Sequence
  Passenger Sequence
guuccauccuucucacgucgcaa

SEQ ID NO: 1907 - RNA, 23 nt, Artificial Sequence
  Passenger Sequence
agacuucagauuucaaccgagaa

SEQ ID NO: 1908 - RNA, 138 nt, Artificial Sequence
  miR Cassette
caugcagacugccugcuugggugagccaaagccuucuaccgacauauggaccugcuaagcuauguaguagaaggcuuuggcugacucaggccgggaccucuuccgccgcacugaggggcacuccacaccacgggggcc

SEQ ID NO: 1909 - RNA, 138 nt, Artificial Sequence
  miR Cassette
gagcucagucaaaccuggaugccuuuucugcaggccucuguguaugcugagacugauaaugugguguuauuuaauccaccauuaucagucucagcacccuacagugucuugcccugucuccggggguuccuaauaaag

SEQ ID NO: 1910 - RNA, 138 nt, Artificial Sequence
  miR Cassette
ucaagccaugcuuccugugcccccaguggggcccuggcuccgguuuguuuaugcaccaaaaguuugcgaugagacacuuuggugcaaaacaaacaggaguccgggcacccccagcucuggagccugacaaggaggaca

SEQ ID NO: 1911 - RNA, 138 nt, Artificial Sequence
  miR Cassette
ucaagccaugcuuccugugcccccaguggggcccuggcuucgauggaucauacuacuaaaaguuugcgaugagacacuuuaguaguugauccauagaaguccgggcacccccagcucuggagccugacaaggaggaca

SEQ ID NO: 1912 - RNA, 138 nt, Artificial Sequence
  miR Cassette
caugcagacugccugcuuggggacucagcauccucaugugauauuauggaccugcuaagcuaauagacaugaggaugcugagaccucaggccgggaccucuuccgccgcacugaggggcacuccacaccacgggggcc

SEQ ID NO: 1913 - RNA, 138 nt, Artificial Sequence
  miR Cassette
cccaaaagagagaagauauugaggccuguugccacauugaacaaggggcugauuugggguauuaguccgcccaaaccagacccuugcucauugugucuguuaggcaaucucacggaccuggggcuuugcuuauaugcc

SEQ ID NO: 1914 - RNA, 138 nt, Artificial Sequence
  miR Cassette
cccaaaagagagaagauauugaggccuguugccacauuuggugcaaaacaaacaggcuguauuaguccgagccugcuugguuugcaacaauugugucuguuaggcaaucucacggaccuggggcuuugcuuauaugcc

SEQ ID NO: 1915 - RNA, 138 nt, Artificial Sequence
  miR Cassette
cccaaaagagagaagauauugaggccuguugccacaucggguugaaaucugaagugugguauuaguccgcacacuccagcuuucaaaccguugugucuguuaggcaaucucacggaccuggggcuuugcuuauaugcc

SEQ ID NO: 1916 - RNA, 138 nt, Artificial Sequence
  miR Cassette
cccaaaagagagaagauauugaggccuguugccacaaggacuguaggcaacauauugcguauuaguccggcaauacguuuccuacaauccaugugucuguuaggcaaucucacggaccuggggcuuugcuuauaugcc

SEQ ID NO: 1917 - RNA, 138 nt, Artificial Sequence
  miR Cassette
gagcucagucaaaccuggaugccuuuucugcaggcgucugugacugauguaaguauaugaaccauguuauuuaauccauggcauauacuuacaucaagcuacagucucuugcccugucuccggggguuccuaauaaag

SEQ ID NO: 1918 - RNA, 138 nt, Artificial Sequence
  miR Cassette
gagcucagucaaaccuggaugccuuuucugcaggccucuguguugaacaaggggcugauuuggguguuauuuaauccacccaucagccccuuguuccccuacagugucuugcccugucuccggggguuccuaauaaag

SEQ ID NO: 1919 - RNA, 138 nt, Artificial Sequence
  miR Cassette
gcagggccggcaugccucugcugcuggccacgcaaaucagacccuuguucaccugucugcaccugucacuaguugaacaaggggcugauuuggguggccguguagugcuacccagcgcuggcugccuccucagcauug

SEQ ID NO: 1920 - RNA, 138 nt, Artificial Sequence
  miR Cassette
caugcagacugccugcuugggcucacuucagauuucaacgacgauauggaccugcuaagcuaucggguugaaaucugaagugugcucaggccgggaccucuuccgccgcacugaggggcacuccacaccacgggggcc

SEQ ID NO: 1921 - RNA, 138 nt, Artificial Sequence
  miR Cassette
cccaaaagagagaagauauugaugccuguugccacauugaacaaggggcugauuugggguauuaguccgcccaaaccagacccuugcucauugugucuguuaggcuauuccacggaccuggggcuuugcuuauaugcc

SEQ ID NO: 1922 - RNA, 138 nt, Artificial Sequence
  miR Cassette
ggcuacagaguuugcuuagcagagcugucggguugaaaucugaagugugugucuaaacuaucacacuucagacuucaaccauauagcuacugcuaggccauccuucccucgauaaaugucuuggcaucguuugcuuug

SEQ ID NO: 1923 - RNA, 138 nt, Artificial Sequence
  miR Cassette
caugcagacugccugcuugggcucacuucagauuucaacgacgauauggaccugcuaagcuaucggguugaaaucugaagugugcucaggccgggaccucucucgccgcacugaggggcacuccacaccacgggggcc

SEQ ID NO: 1924 - RNA, 138 nt, Artificial Sequence
  miR Cassette
caugcagacugccugcuugggcgcaaaucagccccuugucgcaauauggaccugcuaagcuauugaacaaggggcugauuugggcucaggccgggaccucuuccgccgcacugaggggcacuccacaccacgggggcc

SEQ ID NO: 1925 - RNA, 138 nt, Artificial Sequence
  miR Cassette
gcagggccggcaugccucugcugcuggccacucacuucagcuuucaauucgccugucugcaccugucacuagucggguugaaaucugaaguguguggccguguagugcuacccagcgcuggcugccuccucagcauug

SEQ ID NO: 1926 - RNA, 138 nt, Artificial Sequence
  miR Cassette
cccaaaagagagaagauauugaugccuguugccacaaggacuguaggcaacauauugcguauuaguccggcaauacguuuccuacaauccaugugucuguuaggcuauuccacggaccuggggcuuugcuuauaugcc

SEQ ID NO: 1927 - RNA, 138 nt, Artificial Sequence
  miR Cassette
gcagggccggcaugccucugcugcuggccaugccaaaucauccccuuguucccugucugcaccugucacuagugaacaaggggcugauuugggauggccguguagugcuacccagcgcuggcugccuccucagcauug

SEQ ID NO: 1928 - RNA, 138 nt, Artificial Sequence
  miR Cassette
caugcagacugccugcuugggugucagccaaagccuucucccuauauggaccugcuaagcuauaguagaaggcuuuggcugagacucaggccgggaccucucucgccgcacugaggggcacuccacaccacgggggcc

SEQ ID NO: 1929 - RNA, 138 nt, Artificial Sequence
  miR Cassette
caugcagacugccugcuugggugagucucagcauccucacgguauauggaccugcuaagcuauacaugaggaugcugagacugacucaggccgggaccucucucgccgcacugaggggcacuccacaccacgggggcc

SEQ ID NO: 1930 - RNA, 138 nt, Artificial Sequence
  miR Cassette
gagcucagucaaaccuggaugccuuuucugcaggcgucuguguugaacaaggggcugauuuggguguuauuuaauccacccaucagccccuuguuccccuacagucucuugcccugucuccggggguuccuaauaaag

SEQ ID NO: 1931 - RNA, 138 nt, Artificial Sequence
  miR Cassette
cuggaggcuugcuuugggcuguaugcuguugaacaaggggcugauuuggguuuuggccucugacugacccaaaucgcccuuguucaacaggacaaggcccuuuaucagcacucacauggaacaaauggccaccguggg

SEQ ID NO: 1932 - RNA, 138 nt, Artificial Sequence
  miR Cassette
caugcagacugccugcuugggcgcaaaucagccccuugucgcaauauggaccugcuaagcuauugaacaaggggcugauuugggcucaggccgggaccucucucgccgcacugaggggcacuccacaccacgggggcc

SEQ ID NO: 1933 - RNA, 138 nt, Artificial Sequence
  miR Cassette
cuggaggcuugcuuugggcuguaugcuguagauucagaaguagaacuugguuuuggccucugacugaccaaguucacucugaaucuacaggacaaggcccuuuaucagcacucacauggaacaaauggccaccguggg

SEQ ID NO: 1934 - RNA, 138 nt, Artificial Sequence
  miR Cassette
caugcagacugccugcuuggggacucagcauccucaugugauauuauggaccugcuaagcuaauagacaugaggaugcugagaccucaggccgggaccucucucgccgcacugaggggcacuccacaccacgggggcc

SEQ ID NO: 1935 - RNA, 138 nt, Artificial Sequence
  miR Cassette
gagcucagucaaaccuggaugccuuuucugcaggccucugugacuggaauuucucugaacugcuuguuauuuaauccaagcuucagagaaauuccaagcuacagugucuugcccugucuccggggguuccuaauaaag

SEQ ID NO: 1936 - RNA, 138 nt, Artificial Sequence
  miR Cassette
ggcuacagaguuuccuuagcagagcugaggaugcugagacugauaauguugucuaaacuauacauuaucaguaucagcauaauuagcuacugcuaggcaauccuucccucgauaaaugucuuggcaucguuugcuuug

SEQ ID NO: 1937 - RNA, 138 nt, Artificial Sequence
  miR Cassette
cccaaaagagagaagauauugaugccuguugccacauaugucuuggcuugauucacugguauuaguccgcagugacucacgccaagccauuugugucuguuaggcuauuccacggaccuggggcuuugcuuauaugcc

SEQ ID NO: 1938 - RNA, 138 nt, Artificial Sequence
  miR Cassette
ggcuacagaguuuccuuagcagagcugauagacaugaggaugcugagacugucuaaacuaugucucagcaucaucaugucgcuuagcuacugcuaggcaauccuucccucgauaaaugucuuggcaucguuugcuuug

SEQ ID NO: 1939 - RNA, 138 nt, Artificial Sequence
  miR Cassette
gccguccgcgcgccccgcccccgcgucuccaggggccucagcaucauaaugucuaucugugggaacuggaggauagacaugaggaugcugagacccccgcagcacgcccacgcgccgcgccacgccgcgccccgagcc

SEQ ID NO: 1940 - RNA, 138 nt, Artificial Sequence
  miR Cassette
caugcagacugccugcuugggcgacauuaucagucucaggaauauauggaccugcuaagcuauaugcugagacugauaauguggcucaggccgggaccucuuccgccgcacugaggggcacuccacaccacgggggcc

SEQ ID NO: 1941 - RNA, 138 nt, Artificial Sequence
  miR Cassette
ucaagccaugcuuccugugcccccaguggggcccuggcuacaagcuuacugccacgcaauaguuugcgaugagacacauugcguggaguaagcugguaguccgggcacccccagcucuggagccugacaaggaggaca

SEQ ID NO: 1942 - RNA, 138 nt, Artificial Sequence
  miR Cassette
cccaaaagagagaagauauugaugccuguugccacaucggguugaaaucugaagugugguauuaguccgcacacuccagcuuucaaaccguugugucuguuaggcuauuccacggaccuggggcuuugcuuauaugcc

SEQ ID NO: 1943 - RNA, 138 nt, Artificial Sequence
  miR Cassette
gagcucagucaaaccuggaugccuuuucugcaggcgucuguguagauucagaaguagaacuugguguuauuuaauccaccauucuacuucugaauccccuacagucucuugcccugucuccggggguuccuaauaaag

SEQ ID NO: 1944 - RNA, 138 nt, Artificial Sequence
  miR Cassette
caugcagacugccugcuugggcgaaguucuacuucugaacgcuauauggaccugcuaagcuauagauucagaaguagaacuuggcucaggccgggaccucuuccgccgcacugaggggcacuccacaccacgggggcc

SEQ ID NO: 1945 - RNA, 138 nt, Artificial Sequence
  miR Cassette
caugcagacugccugcuugggggaauauguugccuacagcgccuuauggaccugcuaagcuaaggacuguaggcaacauauugccucaggccgggaccucuuccgccgcacugaggggcacuccacaccacgggggcc

SEQ ID NO: 1946 - RNA, 138 nt, Artificial Sequence
  miR Cassette
caugcagacugccugcuugggugucagccaaagccuucucccuauauggaccugcuaagcuauaguagaaggcuuuggcugagacucaggccgggaccucuuccgccgcacugaggggcacuccacaccacgggggcc

SEQ ID NO: 1947 - RNA, 138 nt, Artificial Sequence
  miR Cassette
gagcucagucaaaccuggaugccuuuucugcaggcgucuguguuuggugcaaaacaaacaggcuuguuauuuaauccaagcguuuguuuugcaccacccuacagucucuugcccugucuccggggguuccuaauaaag

SEQ ID NO: 1948 - RNA, 138 nt, Artificial Sequence
  miR Cassette
cccaaaagagagaagauauugaggccuguugccacauggaauuucucugaacugcuguguauuaguccgacagcaauuccgagaaacuccuugugucuguuaggcaaucucacggaccuggggcuuugcuuauaugcc

SEQ ID NO: 1949 - RNA, 138 nt, Artificial Sequence
  miR Cassette
ggcuacagaguuugcuuagcagagcuguaugucuuggcuugauucacugugucuaaacuaucagugaaucaaaccaagaccgauagcuacugcuaggccauccuucccucgauaaaugucuuggcaucguuugcuuug

SEQ ID NO: 1950 - RNA, 138 nt, Artificial Sequence
  miR Cassette
gcagggccggcaugccucugcugcuggccagacucagcauacucauguuuaccugucugcaccugucacuagauagacaugaggaugcugagacuggccguguagugcuacccagcgcuggcugccuccucagcauug

SEQ ID NO: 1951 - RNA, 138 nt, Artificial Sequence
  miR Cassette
gcagggccggcaugccucugcugcuggccacgacauuauccgucucaguauccugucugcaccugucacuaguaugcugagacugauaaugugguggccguguagugcuacccagcgcuggcugccuccucagcauug

SEQ ID NO: 1952 - RNA, 138 nt, Artificial Sequence
  miR Cassette
gcagggccggcaugccucugcugcuggccacgaccagcuuccuccacguaaccugucugcaccugucacuagauugcguggaguaagcuggugguggccguguagugcuacccagcgcuggcugccuccucagcauug

SEQ ID NO: 1953 - RNA, 138 nt, Artificial Sequence
  miR Cassette
gccguccgcgcgccccgcccccgcgucuccagggcacaaaucagcacauuguucaacugugggaacuggagguugaacaaggggcugauuugggccccgcagcacgcccacgcgccgcgccacgccgcgccccgagcc

SEQ ID NO: 1954 - RNA, 138 nt, Artificial Sequence
  miR Cassette
gcagggccggcaugccucugcugcuggccacugugaaucacgccaagauauccugucugcaccugucacuaguaugucuuggcuugauucacuguggccguguagugcuacccagcgcuggcugccuccucagcauug

SEQ ID NO: 1955 - RNA, 138 nt, Artificial Sequence
  miR Cassette
ccuggaggcuugcugaaggcuguaugcuguugaacaaggggcugauuuggguuuuggccacugacugacccaaaucgcccuuguucaacaggacacaaggccuguuacuagcacucacauggaacaaauggccaccgg

SEQ ID NO: 1956 - RNA, 138 nt, Artificial Sequence
  miR Cassette
ccuggaggcuugcugaaggcuguaugcuguagauucagaaguagaacuugguuuuggccacugacugaccaaguucacucugaaucuacaggacacaaggccuguuacuagcacucacauggaacaaauggccaccgg

SEQ ID NO: 1957 - RNA, 138 nt, Artificial Sequence
  miR Cassette
ggcuacagaguuuccuuagcagagcugucggguugaaaucugaagugugugucuaaacuaucacacuucagacuucaaccauauagcuacugcuaggcaauccuucccucgauaaaugucuuggcaucguuugcuuug

SEQ ID NO: 1958 - RNA, 138 nt, Artificial Sequence
  miR Cassette
caugcagacugccugcuugggugagccaaagccuucuaccgacauauggaccugcuaagcuauguaguagaaggcuuuggcugacucaggccgggaccucucucgccgcacugaggggcacuccacaccacgggggcc

SEQ ID NO: 1959 - RNA, 138 nt, Artificial Sequence
  miR Cassette
gccguccgcgcgccccgcccccgcgucuccagggcccacuucagagugcaacccgacugugggaacuggaggucggguugaaaucugaagugugccccgcagcacgcccacgcgccgcgccacgccgcgccccgagcc

SEQ ID NO: 1960 - RNA, 138 nt, Artificial Sequence
  miR Cassette
caugcagacugccugcuugggugccaaaucagccccuugcgucauauggaccugcuaagcuaugaacaaggggcugauuugggacucaggccgggaccucucucgccgcacugaggggcacuccacaccacgggggcc

SEQ ID NO: 1961 - RNA, 138 nt, Artificial Sequence
  miR Cassette
gccguccgcgcgccccgcccccgcgucuccagggacucuauggauaaccuacuaaacugugggaacuggagguuuaguaguugauccauagauuccccgcagcacgcccacgcgccgcgccacgccgcgccccgagcc

SEQ ID NO: 1962 - RNA, 138 nt, Artificial Sequence
  miR Cassette
ggcuacagaguuugcuuagcagagcuguugaacaaggggcugauuugggugucuaaacuaucccaaaucagcaccuuguuacauagcuacugcuaggccauccuucccucgauaaaugucuuggcaucguuugcuuug

SEQ ID NO: 1963 - RNA, 138 nt, Artificial Sequence
  miR Cassette
cuggaggcuugcuuugggcuguaugcugucggguugaaaucugaaguguguuuuggccucugacugacacacuucgauucaacccgacaggacaaggcccuuuaucagcacucacauggaacaaauggccaccguggg

SEQ ID NO: 1964 - RNA, 138 nt, Artificial Sequence
  miR Cassette
gcagggccggcaugccucugcugcuggccauucgauccauacuucucauguccugucugcaccugucacuagaacgugagaaggauggaucguauggccguguagugcuacccagcgcuggcugccuccucagcauug

SEQ ID NO: 1965 - RNA, 138 nt, Artificial Sequence
  miR Cassette
cccaaaagagagaagauauugaggccuguugccacauguaguagaaggcuuuggcugaguauuaguccgucagcccaagacuucuaauacuugugucuguuaggcaaucucacggaccuggggcuuugcuuauaugcc

SEQ ID NO: 1966 - RNA, 138 nt, Artificial Sequence
  miR Cassette
gcagggccggcaugccucugcugcuggccacgaaguucuaauucugaaucuccugucugcaccugucacuaguagauucagaaguagaacuugguggccguguagugcuacccagcgcuggcugccuccucagcauug

SEQ ID NO: 1967 - RNA, 138 nt, Artificial Sequence
  miR Cassette
caugcagacugccugcuugggugccaaaucagccccuugcgucauauggaccugcuaagcuaugaacaaggggcugauuugggacucaggccgggaccucuuccgccgcacugaggggcacuccacaccacgggggcc

SEQ ID NO: 1968 - RNA, 138 nt, Artificial Sequence
  miR Cassette
gagcucagucaaaccuggaugccuuuucugcaggccucugugucggguugaaaucugaaguguguguuauuuaauccacacuucagauuucaacccaccuacagugucuugcccugucuccggggguuccuaauaaag

SEQ ID NO: 1969 - RNA, 138 nt, Artificial Sequence
  miR Cassette
caugcagacugccugcuugggauucuauggaucaacuaccgaaauauggaccugcuaagcuauuuaguaguugauccauagauucucaggccgggaccucuuccgccgcacugaggggcacuccacaccacgggggcc

SEQ ID NO: 1970 - RNA, 138 nt, Artificial Sequence
  miR Cassette
cccaaaagagagaagauauugaugccuguugccacauucacuuuagcacugauagcagguauuaguccgcugcuaccagggcuaaaaugauugugucuguuaggcuauuccacggaccuggggcuuugcuuauaugcc

SEQ ID NO: 1971 - RNA, 138 nt, Artificial Sequence
  miR Cassette
cuggaggcuugcuuugggcuguaugcuguaggacuguaggcaacauauuguuuuggccucugacugacaauaugugccacaguccuacaggacaaggcccuuuaucagcacucacauggaacaaauggccaccguggg

SEQ ID NO: 1972 - RNA, 138 nt, Artificial Sequence
  miR Cassette
gagcucagucaaaccuggaugccuuuucugcaggccucugugugaacaaggggcugauuugggauguuauuuaauccauccaaucagccccuuguuaccuacagugucuugcccugucuccggggguuccuaauaaag

SEQ ID NO: 1973 - RNA, 138 nt, Artificial Sequence
  miR Cassette
cccaaaagagagaagauauugaugccuguugccacauuuggugcaaaacaaacaggcuguauuaguccgagccugcuugguuugcaacaauugugucuguuaggcuauuccacggaccuggggcuuugcuuauaugcc

SEQ ID NO: 1974 - RNA, 138 nt, Artificial Sequence
  miR Cassette
ggcuacagaguuuccuuagcagagcuguagauucagaaguagaacuuggugucuaaacuauccaaguucuaccucugaauagauagcuacugcuaggcaauccuucccucgauaaaugucuuggcaucguuugcuuug

SEQ ID NO: 1975 - RNA, 138 nt, Artificial Sequence
  miR Cassette
gagcucagucaaaccuggaugccuuuucugcaggcgucugugucggguugaaaucugaaguguguguuauuuaauccacacuucagauuucaacccaccuacagucucuugcccugucuccggggguuccuaauaaag

SEQ ID NO: 1976 - RNA, 138 nt, Artificial Sequence
  miR Cassette
gccguccgcgcgccccgcccccgcgucuccaggguccagaccaaauauuaguuaaucugugggaacuggaggauuaacuacucuuuggucugaaccccgcagcacgcccacgcgccgcgccacgccgcgccccgagcc

SEQ ID NO: 1977 - RNA, 138 nt, Artificial Sequence
  miR Cassette
cuggaggcuugcuuugggcuguaugcugaggacuguaggcaacauauugcuuuuggccucugacugagcaauaugugcuacaguccucaggacaaggcccuuuaucagcacucacauggaacaaauggccaccguggg

SEQ ID NO: 1978 - RNA, 138 nt, Artificial Sequence
  miR Cassette
caugcagacugccugcuuggggaucagacuuuguuguggcgacauauggaccugcuaagcuauguaccacaacaaagucugaaccucaggccgggaccucuuccgccgcacugaggggcacuccacaccacgggggcc

SEQ ID NO: 1979 - RNA, 138 nt, Artificial Sequence
  miR Cassette
gagcucagucaaaccuggaugccuuuucugcaggcgucugugacuguaggcaacauauugcguguguuauuuaauccacacaauauguugccuacaagcuacagucucuugcccugucuccggggguuccuaauaaag

SEQ ID NO: 1980 - RNA, 138 nt, Artificial Sequence
  miR Cassette
caugcagacugccugcuugggacccuguuuguuuugcacgaaaauauggaccugcuaagcuauuuggugcaaaacaaacaggcucucaggccgggaccucucucgccgcacugaggggcacuccacaccacgggggcc

SEQ ID NO: 1981 - RNA, 138 nt, Artificial Sequence
  miR Cassette
caugcagacugccugcuugggcuauauguugccuacagugacuauauggaccugcuaagcuauaggacuguaggcaacauauugcucaggccgggaccucucucgccgcacugaggggcacuccacaccacgggggcc

SEQ ID NO: 1982 - RNA, 138 nt, Artificial Sequence
  miR Cassette
cccaaaagagagaagauauugaggccuguugccacauagauucagaaguagaacuuggguauuaguccgccaaguccuaauucugacucuuugugucuguuaggcaaucucacggaccuggggcuuugcuuauaugcc

SEQ ID NO: 1983 - RNA, 138 nt, Artificial Sequence
  miR Cassette
caugcagacugccugcuugggggcaaguucuacuucugaccucuuauggaccugcuaagcuaagauucagaaguagaacuuggccucaggccgggaccucuuccgccgcacugaggggcacuccacaccacgggggcc

SEQ ID NO: 1984 - RNA, 138 nt, Artificial Sequence
  miR Cassette
ggcuacagaguuuccuuagcagagcuguaggacuguaggcaacauauugugucuaaacuaucaauauguugcauacagucagauagcuacugcuaggcaauccuucccucgauaaaugucuuggcaucguuugcuuug

SEQ ID NO: 1985 - RNA, 138 nt, Artificial Sequence
  miR Cassette
cccaaaagagagaagauauugaugccuguugccacaugaacaaggggcugauuugggaguauuaguccgucccaacucauccccuuauucuugugucuguuaggcuauuccacggaccuggggcuuugcuuauaugcc

SEQ ID NO: 1986 - RNA, 138 nt, Artificial Sequence
  miR Cassette
gcagggccggcaugccucugcugcuggccaauucuauggagcaacuauuaaccugucugcaccugucacuaguuuaguaguugauccauagauuuggccguguagugcuacccagcgcuggcugccuccucagcauug

SEQ ID NO: 1987 - RNA, 138 nt, Artificial Sequence
  miR Cassette
gagcucagucaaaccuggaugccuuuucugcaggcgucugugauugcguggaguaagcuggugguguuauuuaauccaccaagcuuacuccacgcacgcuacagucucuugcccugucuccggggguuccuaauaaag

SEQ ID NO: 1988 - RNA, 138 nt, Artificial Sequence
  miR Cassette
gccguccgcgcgccccgcccccgcgucuccaggguaagucucagccuacucauguacugugggaacuggagguacaugaggaugcugagacugaccccgcagcacgcccacgcgccgcgccacgccgcgccccgagcc

SEQ ID NO: 1989 - RNA, 138 nt, Artificial Sequence
  miR Cassette
caugcagacugccugcuuggguucgauccauccuucucagaguuuauggaccugcuaagcuaaacgugagaaggauggaucguacucaggccgggaccucucucgccgcacugaggggcacuccacaccacgggggcc

SEQ ID NO: 1990 - RNA, 138 nt, Artificial Sequence
  miR Cassette
cuggaggcuugcuuugggcuguaugcuguaugcugagacugauaaugugguuuuggccucugacugaccacauuacagcucagcauacaggacaaggcccuuuaucagcacucacauggaacaaauggccaccguggg

SEQ ID NO: 1991 - RNA, 138 nt, Artificial Sequence
  miR Cassette
ggcuacagaguuuccuuagcagagcugaacuguaccacaacaaagucugugucuaaacuaucagacuuuguuaugguacauguuagcuacugcuaggcaauccuucccucgauaaaugucuuggcaucguuugcuuug

SEQ ID NO: 1992 - RNA, 138 nt, Artificial Sequence
  miR Cassette
ggcuacagaguuugcuuagcagagcugugaacaaggggcugauuugggaugucuaaacuauucccaaaucagacccuugugaauagcuacugcuaggccauccuucccucgauaaaugucuuggcaucguuugcuuug

SEQ ID NO: 1993 - RNA, 138 nt, Artificial Sequence
  miR Cassette
gagcucagucaaaccuggaugccuuuucugcaggcgucugugauagacaugaggaugcugagacuguuauuuaauccagucagcauccucaugucucgcuacagucucuugcccugucuccggggguuccuaauaaag

SEQ ID NO: 1994 - RNA, 138 nt, Artificial Sequence
  miR Cassette
cccaaaagagagaagauauugaugccuguugccacauguaguagaaggcuuuggcugaguauuaguccgucagcccaagacuucuaauacuugugucuguuaggcuauuccacggaccuggggcuuugcuuauaugcc

SEQ ID NO: 1995 - RNA, 138 nt, Artificial Sequence
  miR Cassette
caugcagacugccugcuugggagacuucagauuucaaccgagaauauggaccugcuaagcuauucggguugaaaucugaagugucucaggccgggaccucuuccgccgcacugaggggcacuccacaccacgggggcc

SEQ ID NO: 1996 - RNA, 138 nt, Artificial Sequence
  miR Cassette
caugcagacugccugcuugggguuccauccuucucacgucgcaauauggaccugcuaagcuauugaacgugagaaggauggauccucaggccgggaccucuuccgccgcacugaggggcacuccacaccacgggggcc

SEQ ID NO: 1997 - RNA, 138 nt, Artificial Sequence
  miR Cassette
gagcucagucaaaccuggaugccuuuucugcaggccucuguguuuggugcaaaacaaacaggcuuguuauuuaauccaagcguuuguuuugcaccacccuacagugucuugcccugucuccggggguuccuaauaaag

SEQ ID NO: 1998 - RNA, 138 nt, Artificial Sequence
  miR Cassette
cuggaggcuugcuuugggcuguaugcugaacuguaccacaacaaagucuguuuuggccucugacugacagacuuuuuggguacaguucaggacaaggcccuuuaucagcacucacauggaacaaauggccaccguggg

SEQ ID NO: 1999 - RNA, 138 nt, Artificial Sequence
  miR Cassette
caugcagacugccugcuugggcuauauguugccuacagugacuauauggaccugcuaagcuauaggacuguaggcaacauauugcucaggccgggaccucuuccgccgcacugaggggcacuccacaccacgggggcc

SEQ ID NO: 2000 - RNA, 138 nt, Artificial Sequence
  miR Cassette
gagcucagucaaaccuggaugccuuuucugcaggccucuguguagauucagaaguagaacuugguguuauuuaauccaccauucuacuucugaauccccuacagugucuugcccugucuccggggguuccuaauaaag

SEQ ID NO: 2001 - RNA, 138 nt, Artificial Sequence
  miR Cassette
ggcuacagaguuugcuuagcagagcugaugucuuggcuugauucacuggugucuaaacuauccagugaaucacgccaagaacuuagcuacugcuaggccauccuucccucgauaaaugucuuggcaucguuugcuuug

SEQ ID NO: 2002 - RNA, 138 nt, Artificial Sequence
  miR Cassette
caugcagacugccugcuuggguucgauccauccuucucagaguuuauggaccugcuaagcuaaacgugagaaggauggaucguacucaggccgggaccucuuccgccgcacugaggggcacuccacaccacgggggcc

SEQ ID NO: 2003 - RNA, 138 nt, Artificial Sequence
  miR Cassette
caugcagacugccugcuugggaucccacguuccuucucugaagauauggaccugcuaagcuaucugagagaaggaacguggguucucaggccgggaccucucucgccgcacugaggggcacuccacaccacgggggcc

SEQ ID NO: 2004 - RNA, 138 nt, Artificial Sequence
  miR Cassette
caugcagacugccugcuugggcagcuaucagugcuaaagcggaauauggaccugcuaagcuauucacuuuagcacugauagcagcucaggccgggaccucuuccgccgcacugaggggcacuccacaccacgggggcc

SEQ ID NO: 2005 - RNA, 138 nt, Artificial Sequence
  miR Cassette
cccaaaagagagaagauauugaugccuguugccacauggaauuucucugaacugcuguguauuaguccgacagcaauuccgagaaacuccuugugucuguuaggcuauuccacggaccuggggcuuugcuuauaugcc

SEQ ID NO: 2006 - RNA, 138 nt, Artificial Sequence
  miR Cassette
gagcucagucaaaccuggaugccuuuucugcaggccucugugacugauguaaguauaugaaccauguuauuuaauccauggcauauacuuacaucaagcuacagugucuugcccugucuccggggguuccuaauaaag

SEQ ID NO: 2007 - RNA, 138 nt, Artificial Sequence
  miR Cassette
ccuggaggcuugcugaaggcuguaugcugugaguuaucucuuucuaagggcuuuuggccacugacugagcccuuagaaggauaacucacaggacacaaggccuguuacuagcacucacauggaacaaauggccaccgg

SEQ ID NO: 2008 - DNA, 22 bp, Artificial Sequence
  Passenger Sequence
gtctcaacatactcatgcctaa

SEQ ID NO: 2009 - DNA, 138 bp, Artificial Sequence
  miR Cassette
cccaaaagagagaagatattgaggcctgttgccacaatagacatgaggatgctgagacgtattagtccggtctcaacatactcatgcctaatgtgtctgttaggcaatctcacggacctggggctttgcttatatgcc

SEQ ID NO: 2010 - RNA, 22 nt, Artificial Sequence
  Passenger Sequence
gucucaacauacucaugccuaa

SEQ ID NO: 2011 - RNA, 138 nt, Artificial Sequence
  miR Cassette
cccaaaagagagaagauauugaggccuguugccacaauagacaugaggaugcugagacguauuaguccggucucaacauacucaugccuaaugugucuguuaggcaaucucacggaccuggggcuuugcuuauaugcc

SEQ ID NO: 2012 - DNA, 22 bp, Artificial Sequence
  Guide Sequence
tttgttactgtttcgacctctg

SEQ ID NO: 2013 - DNA, 22 bp, Artificial Sequence
  Passenger Sequence
cagaggccgacacagtaccaat

SEQ ID NO: 2014 - DNA, 138 bp, Artificial Sequence
  miR Cassette
cccaaaagagagaagatattgaggcctgttgccacatttgttactgtttcgacctctggtattagtccgcagaggccgacacagtaccaattgtgtctgttaggcaatctcacggacctggggctttgcttatatgcc

SEQ ID NO: 2015 - RNA, 22 nt, Artificial Sequence
  Guide Sequence
uuuguuacuguuucgaccucug

SEQ ID NO: 2016 - RNA, 22 nt, Artificial Sequence
  Passenger Sequence
cagaggccgacacaguaccaau

SEQ ID NO: 2017 - RNA, 138 nt, Artificial Sequence
  miR Cassette
cccaaaagagagaagauauugaggccuguugccacauuuguuacuguuucgaccucugguauuaguccgcagaggccgacacaguaccaauugugucuguuaggcaaucucacggaccuggggcuuugcuuauaugcc

SEQ ID NO: 2018 - DNA, 22 bp, Artificial Sequence
  Passenger Sequence
ccacatcatccgtctcaacatt

SEQ ID NO: 2019 - DNA, 138 bp, Artificial Sequence
  miR Cassette
cccaaaagagagaagatattgaggcctgttgccacatatgctgagactgataatgtgggtattagtccgccacatcatccgtctcaacatttgtgtctgttaggcaatctcacggacctggggctttgcttatatgcc

SEQ ID NO: 2020 - RNA, 22 nt, Artificial Sequence
  Passenger Sequence
ccacaucauccgucucaacauu

SEQ ID NO: 2021 - RNA, 138 nt, Artificial Sequence
  miR Cassette
cccaaaagagagaagauauugaggccuguugccacauaugcugagacugauaauguggguauuaguccgccacaucauccgucucaacauuugugucuguuaggcaaucucacggaccuggggcuuugcuuauaugcc

SEQ ID NO: 2022 - DNA, 22 bp, Artificial Sequence
  Passenger Sequence
agcagtccagcgaaattacaga

SEQ ID NO: 2023 - DNA, 138 bp, Artificial Sequence
  miR Cassette
cccaaaagagagaagatattgatgcctgttgccacaactggaatttctctgaactgctgtattagtccgagcagtccagcgaaattacagatgtgtctgttaggctattccacggacctggggctttgcttatatgcc

SEQ ID NO: 2024 - RNA, 22 nt, Artificial Sequence
  Passenger Sequence
agcaguccagcgaaauuacaga

SEQ ID NO: 2025 - RNA, 138 nt, Artificial Sequence
  miR Cassette
cccaaaagagagaagauauugaugccuguugccacaacuggaauuucucugaacugcuguauuaguccgagcaguccagcgaaauuacagaugugucuguuaggcuauuccacggaccuggggcuuugcuuauaugcc

SEQ ID NO: 2026 - DNA, 138 bp, Artificial Sequence
  miR Cassette
ggctacagagtttccttagcagagctgtgaacaaggggctgatttgggatgtctaaactattcccaaatcagacccttgtgaatagctactgctaggcaatccttccctcgataaatgtcttggcatcgtttgctttg

SEQ ID NO: 2027 - RNA, 138 nt, Artificial Sequence
  miR Cassette
ggcuacagaguuuccuuagcagagcugugaacaaggggcugauuugggaugucuaaacuauucccaaaucagacccuugugaauagcuacugcuaggcaauccuucccucgauaaaugucuuggcaucguuugcuuug

SEQ ID NO: 2028 - DNA, 22 bp, Artificial Sequence
  Passenger Sequence
ccacattatcaatctcagccga

SEQ ID NO: 2029 - DNA, 138 bp, Artificial Sequence
  miR Cassette
ggctacagagtttccttagcagagctgtatgctgagactgataatgtggtgtctaaactatccacattatcaatctcagccgatagctactgctaggcaatccttccctcgataaatgtcttggcatcgtttgctttg

SEQ ID NO: 2030 - RNA, 22 nt, Artificial Sequence
  Passenger Sequence
ccacauuaucaaucucagccga

SEQ ID NO: 2031 - RNA, 138 nt, Artificial Sequence
  miR Cassette
ggcuacagaguuuccuuagcagagcuguaugcugagacugauaauguggugucuaaacuauccacauuaucaaucucagccgauagcuacugcuaggcaauccuucccucgauaaaugucuuggcaucguuugcuuug

SEQ ID NO: 2032 - DNA, 22 bp, Artificial Sequence
  Passenger Sequence
gcaatatgttgactacagtaat

SEQ ID NO: 2033 - DNA, 138 bp, Artificial Sequence
  miR Cassette
ggctacagagtttccttagcagagctgaggactgtaggcaacatattgctgtctaaactatgcaatatgttgactacagtaattagctactgctaggcaatccttccctcgataaatgtcttggcatcgtttgctttg

SEQ ID NO: 2034 - RNA, 22 nt, Artificial Sequence
  Passenger Sequence
gcaauauguugacuacaguaau

SEQ ID NO: 2035 - RNA, 138 nt, Artificial Sequence
  miR Cassette
ggcuacagaguuugcuuagcagagcugaggacuguaggcaacauauugcugucuaaacuaugcaauauguugacuacaguaauuagcuacugcuaggccauccuucccucgauaaaugucuuggcaucguuugcuuug

SEQ ID NO: 2036 - DNA, 22 bp, Artificial Sequence
  Passenger Sequence
tcagtctcagcctcctcattga

SEQ ID NO: 2037 - DNA, 138 bp, Artificial Sequence
  miR Cassette
ggctacagagtttgcttagcagagctgtacatgaggatgctgagactgatgtctaaactattcagtctcagcctcctcattgatagctactgctaggccatccttccctcgataaatgtcttggcatcgtttgctttg

SEQ ID NO: 2038 - RNA, 22 nt, Artificial Sequence
  Passenger Sequence
ucagucucagccuccucauuga

SEQ ID NO: 2039 - RNA, 138 nt, Artificial Sequence
  miR Cassette
ggcuacagaguuugcuuagcagagcuguacaugaggaugcugagacugaugucuaaacuauucagucucagccuccucauugauagcuacugcuaggccauccuucccucgauaaaugucuuggcaucguuugcuuug

SEQ ID NO: 2040 - DNA, 138 bp, Artificial Sequence
  miR Cassette
ggctacagagtttgcttagcagagctgaactgtaccacaacaaagtctgtgtctaaactatcagactttgttatggtacatgttagctactgctaggccatccttccctcgataaatgtcttggcatcgtttgctttg

SEQ ID NO: 2041 - RNA, 138 nt, Artificial Sequence
  miR Cassette
ggcuacagaguuugcuuagcagagcugaacuguaccacaacaaagucugugucuaaacuaucagacuuuguuaugguacauguuagcuacugcuaggccauccuucccucgauaaaugucuuggcaucguuugcuuug

SEQ ID NO: 2042 - DNA, 22 bp, Artificial Sequence
  Passenger Sequence
acgccacgttcattcgatcaga

SEQ ID NO: 2043 - DNA, 138 bp, Artificial Sequence
  miR Cassette
ttccttcctcaggagaaaggcctctctcacgccacgttcattcgatcagaatttaaatgtccatacaattctgagagaaggaacgtgggttgaatggggctggctgagcaccgtgggtcggcgagggcccgccaagga

SEQ ID NO: 2044 - RNA, 22 nt, Artificial Sequence
  Passenger Sequence
acgccacguucauucgaucaga

SEQ ID NO: 2045 - RNA, 138 nt, Artificial Sequence
  miR Cassette
uuccuuccucaggagaaaggccucucucacgccacguucauucgaucagaauuuaaauguccauacaauucugagagaaggaacguggguugaauggggcuggcugagcaccgugggucggcgagggcccgccaagga

SEQ ID NO: 2046 - DNA, 22 bp, Artificial Sequence
  Passenger Sequence
aagctgtttgtgttgacccaaa

SEQ ID NO: 2047 - DNA, 138 bp, Artificial Sequence
  miR Cassette
ttccttcctcaggagaaaggcctctctcaagctgtttgtgttgacccaaaatttaaatgtccatacaattttggtgcaaaacaaacaggctgaatggggctggctgagcaccgtgggtcggcgagggcccgccaagga

SEQ ID NO: 2048 - RNA, 22 nt, Artificial Sequence
  Passenger Sequence
aagcuguuuguguugacccaaa

SEQ ID NO: 2049 - RNA, 138 nt, Artificial Sequence
  miR Cassette
uuccuuccucaggagaaaggccucucucaagcuguuuguguugacccaaaauuuaaauguccauacaauuuuggugcaaaacaaacaggcugaauggggcuggcugagcaccgugggucggcgagggcccgccaagga

SEQ ID NO: 2050 - DNA, 22 bp, Artificial Sequence
  Passenger Sequence
ccgcagcttacgccaaacaata

SEQ ID NO: 2051 - DNA, 138 bp, Artificial Sequence
  miR Cassette
ttccttcctcaggagaaaggcctctctcccgcagcttacgccaaacaataatttaaatgtccatacaattattgcgtggagtaagctggtggaatggggctggctgagcaccgtgggtcggcgagggcccgccaagga

SEQ ID NO: 2052 - RNA, 22 nt, Artificial Sequence
  Passenger Sequence
ccgcagcuuacgccaaacaaua

SEQ ID NO: 2053 - RNA, 138 nt, Artificial Sequence
  miR Cassette
uuccuuccucaggagaaaggccucucucccgcagcuuacgccaaacaauaauuuaaauguccauacaauuauugcguggaguaagcugguggaauggggcuggcugagcaccgugggucggcgagggcccgccaagga

SEQ ID NO: 2054 - DNA, 22 bp, Artificial Sequence
  Passenger Sequence
cagctgctagtactgactcgaa

SEQ ID NO: 2055 - DNA, 138 bp, Artificial Sequence
  miR Cassette
ttccttcctcaggagaaaggcctctctccagctgctagtactgactcgaaatttaaatgtccatacaatttcgatgcaggactagcaggcggaatggggctggctgagcaccgtgggtcggcgagggcccgccaagga

SEQ ID NO: 2056 - RNA, 22 nt, Artificial Sequence
  Passenger Sequence
cagcugcuaguacugacucgaa

SEQ ID NO: 2057 - RNA, 138 nt, Artificial Sequence
  miR Cassette
uuccuuccucaggagaaaggccucucuccagcugcuaguacugacucgaaauuuaaauguccauacaauuucgaugcaggacuagcaggcggaauggggcuggcugagcaccgugggucggcgagggcccgccaagga

SEQ ID NO: 2058 - DNA, 22 bp, Artificial Sequence
  Passenger Sequence
cccctatcagttctaccgtgaa

SEQ ID NO: 2059 - DNA, 138 bp, Artificial Sequence
  miR Cassette
ttccttcctcaggagaaaggcctctctccccctatcagttctaccgtgaaatttaaatgtccatacaatttcactttagcactgatagcaggaatggggctggctgagcaccgtgggtcggcgagggcccgccaagga

SEQ ID NO: 2060 - RNA, 22 nt, Artificial Sequence
  Passenger Sequence
ccccuaucaguucuaccgugaa

SEQ ID NO: 2061 - RNA, 138 nt, Artificial Sequence
  miR Cassette
uuccuuccucaggagaaaggccucucucccccuaucaguucuaccgugaaauuuaaauguccauacaauuucacuuuagcacugauagcaggaauggggcuggcugagcaccgugggucggcgagggcccgccaagga

SEQ ID NO: 2062 - DNA, 22 bp, Artificial Sequence
  Guide Sequence
tcgcatactgctgagcaaggga

SEQ ID NO: 2063 - DNA, 22 bp, Artificial Sequence
  Passenger Sequence
tagcttgctcatcaggctgcga

SEQ ID NO: 2064 - DNA, 138 bp, Artificial Sequence
  miR Cassette
ttccttcctcaggagaaaggcctctctctagcttgctcatcaggctgcgaatttaaatgtccatacaattcgcatactgctgagcaagggagaatggggctggctgagcaccgtgggtcggcgagggcccgccaagga

SEQ ID NO: 2065 - RNA, 22 nt, Artificial Sequence
  Guide Sequence
ucgcauacugcugagcaaggga

SEQ ID NO: 2066 - RNA, 22 nt, Artificial Sequence
  Passenger Sequence
uagcuugcucaucaggcugcga

SEQ ID NO: 2067 - RNA, 138 nt, Artificial Sequence
  miR Cassette
uuccuuccucaggagaaaggccucucucuagcuugcucaucaggcugcgaauuuaaauguccauacaauucgcauacugcugagcaagggagaauggggcuggcugagcaccgugggucggcgagggcccgccaagga

SEQ ID NO: 2068 - DNA, 22 bp, Artificial Sequence
  Passenger Sequence
cccaggtcgaaccaggcacaaa

SEQ ID NO: 2069 - DNA, 138 bp, Artificial Sequence
  miR Cassette
ttccttcctcaggagaaaggcctctctccccaggtcgaaccaggcacaaaatttaaatgtccatacaattttgttactgtttcgacctctggaatggggctggctgagcaccgtgggtcggcgagggcccgccaagga

SEQ ID NO: 2070 - RNA, 22 nt, Artificial Sequence
  Passenger Sequence
cccaggucgaaccaggcacaaa

SEQ ID NO: 2071 - RNA, 138 nt, Artificial Sequence
  miR Cassette
uuccuuccucaggagaaaggccucucuccccaggucgaaccaggcacaaaauuuaaauguccauacaauuuuguuacuguuucgaccucuggaauggggcuggcugagcaccgugggucggcgagggcccgccaagga

SEQ ID NO: 2072 - DNA, 22 bp, Artificial Sequence
  Passenger Sequence
acactatggataaacgcctaaa

SEQ ID NO: 2073 - DNA, 138 bp, Artificial Sequence
  miR Cassette
ttccttcctcaggagaaaggcctctctcacactatggataaacgcctaaaatttaaatgtccatacaattttagtagttgatccatagattgaatggggctggctgagcaccgtgggtcggcgagggcccgccaagga

SEQ ID NO: 2074 - RNA, 22 nt, Artificial Sequence
  Passenger Sequence
acacuauggauaaacgccuaaa

SEQ ID NO: 2075 - RNA, 138 nt, Artificial Sequence
  miR Cassette
uuccuuccucaggagaaaggccucucucacacuauggauaaacgccuaaaauuuaaauguccauacaauuuuaguaguugauccauagauugaauggggcuggcugagcaccgugggucggcgagggcccgccaagga

SEQ ID NO: 2076 - DNA, 22 bp, Artificial Sequence
  Passenger Sequence
ccgagccaaagacttacactaa

SEQ ID NO: 2077 - DNA, 138 bp, Artificial Sequence
  miR Cassette
ttccttcctcaggagaaaggcctctctcccgagccaaagacttacactaaatttaaatgtccatacaatttagtagaaggctttggctgaggaatggggctggctgagcaccgtgggtcggcgagggcccgccaagga

SEQ ID NO: 2078 - RNA, 22 nt, Artificial Sequence
  Passenger Sequence
ccgagccaaagacuuacacuaa

SEQ ID NO: 2079 - RNA, 138 nt, Artificial Sequence
  miR Cassette
uuccuuccucaggagaaaggccucucucccgagccaaagacuuacacuaaauuuaaauguccauacaauuuaguagaaggcuuuggcugaggaauggggcuggcugagcaccgugggucggcgagggcccgccaagga

SEQ ID NO: 2080 - DNA, 22 bp, Artificial Sequence
  Guide Sequence
tactgtaggcaacatattgcgt

SEQ ID NO: 2081 - DNA, 22 bp, Artificial Sequence
  Passenger Sequence
aaccaatatgtggccgccagta

SEQ ID NO: 2082 - DNA, 138 bp, Artificial Sequence
  miR Cassette
ttccttcctcaggagaaaggcctctctcaaccaatatgtggccgccagtaatttaaatgtccatacaattactgtaggcaacatattgcgtgaatggggctggctgagcaccgtgggtcggcgagggcccgccaagga

SEQ ID NO: 2083 - RNA, 22 nt, Artificial Sequence
  Guide Sequence
uacuguaggcaacauauugcgu

SEQ ID NO: 2084 - RNA, 22 nt, Artificial Sequence
  Passenger Sequence
aaccaauauguggccgccagua

SEQ ID NO: 2085 - RNA, 138 nt, Artificial Sequence
  miR Cassette
uuccuuccucaggagaaaggccucucucaaccaauauguggccgccaguaauuuaaauguccauacaauuacuguaggcaacauauugcgugaauggggcuggcugagcaccgugggucggcgagggcccgccaagga

SEQ ID NO: 2086 - DNA, 22 bp, Artificial Sequence
  Passenger Sequence
taagccaaagcatgctactaca

SEQ ID NO: 2087 - DNA, 138 bp, Artificial Sequence
  miR Cassette
gccgtccgcgcgccccgcccccgcgtctccagggtaagccaaagcatgctactacactgtgggaactggaggtgtagtagaaggctttggctgaccccgcagcacgcccacgcgccgcgccacgccgcgccccgagcc

SEQ ID NO: 2088 - RNA, 22 nt, Artificial Sequence
  Passenger Sequence
uaagccaaagcaugcuacuaca

SEQ ID NO: 2089 - RNA, 138 nt, Artificial Sequence
  miR Cassette
gccguccgcgcgccccgcccccgcgucuccaggguaagccaaagcaugcuacuacacugugggaacuggagguguaguagaaggcuuuggcugaccccgcagcacgcccacgcgccgcgccacgccgcgccccgagcc

SEQ ID NO: 2090 - DNA, 22 bp, Artificial Sequence
  Passenger Sequence
ccccagcttacgcaacgcaata

SEQ ID NO: 2091 - DNA, 138 bp, Artificial Sequence
  miR Cassette
gccgtccgcgcgccccgcccccgcgtctccagggccccagcttacgcaacgcaatactgtgggaactggaggtattgcgtggagtaagctggtgccccgcagcacgcccacgcgccgcgccacgccgcgccccgagcc

SEQ ID NO: 2092 - RNA, 22 nt, Artificial Sequence
  Passenger Sequence
ccccagcuuacgcaacgcaaua

SEQ ID NO: 2093 - RNA, 138 nt, Artificial Sequence
  miR Cassette
gccguccgcgcgccccgcccccgcgucuccagggccccagcuuacgcaacgcaauacugugggaacuggagguauugcguggaguaagcuggugccccgcagcacgcccacgcgccgcgccacgccgcgccccgagcc

SEQ ID NO: 2094 - DNA, 22 bp, Artificial Sequence
  Passenger Sequence
caaccagcttaatacacgcaat

SEQ ID NO: 2095 - DNA, 138 bp, Artificial Sequence
  miR Cassette
gccgtccgcgcgccccgcccccgcgtctccagggcaaccagcttaatacacgcaatctgtgggaactggaggattgcgtggagtaagctggtggccccgcagcacgcccacgcgccgcgccacgccgcgccccgagcc

SEQ ID NO: 2096 - RNA, 22 nt, Artificial Sequence
  Passenger Sequence
caaccagcuuaauacacgcaau

SEQ ID NO: 2097 - RNA, 138 nt, Artificial Sequence
  miR Cassette
gccguccgcgcgccccgcccccgcgucuccagggcaaccagcuuaauacacgcaaucugugggaacuggaggauugcguggaguaagcugguggccccgcagcacgcccacgcgccgcgccacgccgcgccccgagcc

SEQ ID NO: 2098 - DNA, 22 bp, Artificial Sequence
  Passenger Sequence
accccacgttcatgctctcaga

SEQ ID NO: 2099 - DNA, 138 bp, Artificial Sequence
  miR Cassette
gccgtccgcgcgccccgcccccgcgtctccagggaccccacgttcatgctctcagactgtgggaactggaggtctgagagaaggaacgtgggttccccgcagcacgcccacgcgccgcgccacgccgcgccccgagcc

SEQ ID NO: 2100 - RNA, 22 nt, Artificial Sequence
  Passenger Sequence
accccacguucaugcucucaga

SEQ ID NO: 2101 - RNA, 138 nt, Artificial Sequence
  miR Cassette
gccguccgcgcgccccgcccccgcgucuccagggaccccacguucaugcucucagacugugggaacuggaggucugagagaaggaacguggguuccccgcagcacgcccacgcgccgcgccacgccgcgccccgagcc

SEQ ID NO: 2102 - DNA, 20 bp, Artificial Sequence
  Passenger Sequence
tcagaacagcatcctcatga

SEQ ID NO: 2103 - DNA, 138 bp, Artificial Sequence
  miR Cassette
gccggcggagttctggtatcgttgctgctacatgaggatgctgagactgagacgagcagcgcatcctcttaccctcagaacagcatcctcatgagttgcatcatacccatcctctccaggcgagcctcgtgggaccgg

SEQ ID NO: 2104 - RNA, 20 nt, Artificial Sequence
  Passenger Sequence
ucagaacagcauccucauga

SEQ ID NO: 2105 - RNA, 138 nt, Artificial Sequence
  miR Cassette
gccggcggaguucugguaucguugcugcuacaugaggaugcugagacugagacgagcagcgcauccucuuacccucagaacagcauccucaugaguugcaucauacccauccucuccaggcgagccucgugggaccgg

SEQ ID NO: 2106 - DNA, 20 bp, Artificial Sequence
  Passenger Sequence
ccactgatcagtctcagcaa

SEQ ID NO: 2107 - DNA, 138 bp, Artificial Sequence
  miR Cassette
gccggcggagttctggtatcgttgctgctatgctgagactgataatgtgggacgagcagcgcatcctcttacccccactgatcagtctcagcaagttgcatcatacccatcctctccaggcgagcctcgtgggaccgg

SEQ ID NO: 2108 - RNA, 20 nt, Artificial Sequence
  Passenger Sequence
ccacugaucagucucagcaa

SEQ ID NO: 2109 - RNA, 138 nt, Artificial Sequence
  miR Cassette
gccggcggaguucugguaucguugcugcuaugcugagacugauaaugugggacgagcagcgcauccucuuacccccacugaucagucucagcaaguugcaucauacccauccucuccaggcgagccucgugggaccgg

SEQ ID NO: 2110 - DNA, 20 bp, Artificial Sequence
  Passenger Sequence
agccatttgttttgcaccat

SEQ ID NO: 2111 - DNA, 138 bp, Artificial Sequence
  miR Cassette
gccggcggagttctggtatcgttgctgctttggtgcaaaacaaacaggctgacgagcagcgcatcctcttacccagccatttgttttgcaccatgttgcatcatacccatcctctccaggcgagcctcgtgggaccgg

SEQ ID NO: 2112 - RNA, 20 nt, Artificial Sequence
  Passenger Sequence
agccauuuguuuugcaccau

SEQ ID NO: 2113 - RNA, 138 nt, Artificial Sequence
  miR Cassette
gccggcggaguucugguaucguugcugcuuuggugcaaaacaaacaggcugacgagcagcgcauccucuuacccagccauuuguuuugcaccauguugcaucauacccauccucuccaggcgagccucgugggaccgg

SEQ ID NO: 2114 - DNA, 20 bp, Artificial Sequence
  Passenger Sequence
gggaccagaattcaccgcga

SEQ ID NO: 2115 - DNA, 138 bp, Artificial Sequence
  miR Cassette
gccggcggagttctggtatcgttgctgctacgcggtgaattctgtctcccgacgagcagcgcatcctcttacccgggaccagaattcaccgcgagttgcatcatacccatcctctccaggcgagcctcgtgggaccgg

SEQ ID NO: 2116 - RNA, 20 nt, Artificial Sequence
  Passenger Sequence
gggaccagaauucaccgcga

SEQ ID NO: 2117 - RNA, 138 nt, Artificial Sequence
  miR Cassette
gccggcggaguucugguaucguugcugcuacgcggugaauucugucucccgacgagcagcgcauccucuuacccgggaccagaauucaccgcgaguugcaucauacccauccucuccaggcgagccucgugggaccgg

SEQ ID NO: 2118 - DNA, 138 bp, Artificial Sequence
  miR Cassette
gccggcggagttctggtatcgttgctgctactgtaggcaacatattgcgtgacgagcagcgcatcctcttacccacgctcatgttgcctacagagttgcatcatacccatcctctccaggcgagcctcgtgggaccgg

SEQ ID NO: 2119 - RNA, 20 nt, Artificial Sequence
  Passenger Sequence
acgcucauguugccuacaga

SEQ ID NO: 2120 - RNA, 138 nt, Artificial Sequence
  miR Cassette
gccggcggaguucugguaucguugcugcuacuguaggcaacauauugcgugacgagcagcgcauccucuuacccacgcucauguugccuacagaguugcaucauacccauccucuccaggcgagccucgugggaccgg

SEQ ID NO: 2121 - DNA, 20 bp, Artificial Sequence
  Passenger Sequence
aaccgcgttccttctctcac

SEQ ID NO: 2122 - DNA, 138 bp, Artificial Sequence
  miR Cassette
gccggcggagttctggtatcgttgctgctctgagagaaggaacgtgggttgacgagcagcgcatcctcttacccaaccgcgttccttctctcacgttgcatcatacccatcctctccaggcgagcctcgtgggaccgg

SEQ ID NO: 2123 - RNA, 20 nt, Artificial Sequence
  Passenger Sequence
aaccgcguuccuucucucac

SEQ ID NO: 2124 - RNA, 138 nt, Artificial Sequence
  miR Cassette
gccggcggaguucugguaucguugcugcucugagagaaggaacguggguugacgagcagcgcauccucuuacccaaccgcguuccuucucucacguugcaucauacccauccucuccaggcgagccucgugggaccgg

SEQ ID NO: 2125 - DNA, 20 bp, Artificial Sequence
  Passenger Sequence
caattgttgcctacagtcca

SEQ ID NO: 2126 - DNA, 138 bp, Artificial Sequence
  miR Cassette
gccggcggagttctggtatcgttgctgctaggactgtaggcaacatattggacgagcagcgcatcctcttaccccaattgttgcctacagtccagttgcatcatacccatcctctccaggcgagcctcgtgggaccgg

SEQ ID NO: 2127 - RNA, 20 nt, Artificial Sequence
  Passenger Sequence
caauuguugccuacagucca

SEQ ID NO: 2128 - RNA, 138 nt, Artificial Sequence
  miR Cassette
gccggcggaguucugguaucguugcugcuaggacuguaggcaacauauuggacgagcagcgcauccucuuaccccaauuguugccuacaguccaguugcaucauacccauccucuccaggcgagccucgugggaccgg

SEQ ID NO: 2129 - DNA, 20 bp, Artificial Sequence
  Passenger Sequence
ccacgccttactccacgcat

SEQ ID NO: 2130 - DNA, 138 bp, Artificial Sequence
  miR Cassette
gccggcggagttctggtatcgttgctgcattgcgtggagtaagctggtgggacgagcagcgcatcctcttacccccacgccttactccacgcatgttgcatcatacccatcctctccaggcgagcctcgtgggaccgg

SEQ ID NO: 2131 - RNA, 20 nt, Artificial Sequence
  Passenger Sequence
ccacgccuuacuccacgcau

SEQ ID NO: 2132 - RNA, 138 nt, Artificial Sequence
  miR Cassette
gccggcggaguucugguaucguugcugcauugcguggaguaagcuggugggacgagcagcgcauccucuuacccccacgccuuacuccacgcauguugcaucauacccauccucuccaggcgagccucgugggaccgg

SEQ ID NO: 2133 - DNA, 20 bp, Artificial Sequence
  Passenger Sequence
cccatccagcctcttgttct

SEQ ID NO: 2134 - DNA, 138 bp, Artificial Sequence
  miR Cassette
gccggcggagttctggtatcgttgctgcttgaacaaggggctgatttggggacgagcagcgcatcctcttaccccccatccagcctcttgttctgttgcatcatacccatcctctccaggcgagcctcgtgggaccgg

SEQ ID NO: 2135 - RNA, 20 nt, Artificial Sequence
  Passenger Sequence
cccauccagccucuuguucu

SEQ ID NO: 2136 - RNA, 138 nt, Artificial Sequence
  miR Cassette
gccggcggaguucugguaucguugcugcuugaacaaggggcugauuuggggacgagcagcgcauccucuuaccccccauccagccucuuguucuguugcaucauacccauccucuccaggcgagccucgugggaccgg

SEQ ID NO: 2137 - DNA, 20 bp, Artificial Sequence
  Passenger Sequence
gcccaggaaagagataactg

SEQ ID NO: 2138 - DNA, 138 bp, Artificial Sequence
  miR Cassette
gccggcggagttctggtatcgttgctgctgagttatctctttctaagggcgacgagcagcgcatcctcttacccgcccaggaaagagataactggttgcatcatacccatcctctccaggcgagcctcgtgggaccgg

SEQ ID NO: 2139 - RNA, 20 nt, Artificial Sequence
  Passenger Sequence
gcccaggaaagagauaacug

SEQ ID NO: 2140 - RNA, 138 nt, Artificial Sequence
  miR Cassette
gccggcggaguucugguaucguugcugcugaguuaucucuuucuaagggcgacgagcagcgcauccucuuacccgcccaggaaagagauaacugguugcaucauacccauccucuccaggcgagccucgugggaccgg

SEQ ID NO: 2141 - DNA, 21 bp, Artificial Sequence
  Passenger Sequence
gcgatcagtgcataaagtgaa

SEQ ID NO: 2142 - DNA, 138 bp, Artificial Sequence
  miR Cassette
tcaagccatgcttcctgtgcccccagtggggccctggctgcgatcagtgcataaagtgaaagtttgcgatgagacacttcactttagcactgatagcagtccgggcacccccagctctggagcctgacaaggaggaca

SEQ ID NO: 2143 - RNA, 21 nt, Artificial Sequence
  Passenger Sequence
gcgaucagugcauaaagugaa

SEQ ID NO: 2144 - RNA, 138 nt, Artificial Sequence
  miR Cassette
ucaagccaugcuuccugugcccccaguggggcccuggcugcgaucagugcauaaagugaaaguuugcgaugagacacuucacuuuagcacugauagcaguccgggcacccccagcucuggagccugacaaggaggaca

SEQ ID NO: 2145 - DNA, 21 bp, Artificial Sequence
  Passenger Sequence
tcaatccttctgcacgttcaa

SEQ ID NO: 2146 - DNA, 138 bp, Artificial Sequence
  miR Cassette
tcaagccatgcttcctgtgcccccagtggggccctggcttcaatccttctgcacgttcaaagtttgcgatgagacacttgaacgtgagaaggatggaagtccgggcacccccagctctggagcctgacaaggaggaca

SEQ ID NO: 2147 - RNA, 21 nt, Artificial Sequence
  Passenger Sequence
ucaauccuucugcacguucaa

SEQ ID NO: 2148 - RNA, 138 nt, Artificial Sequence
  miR Cassette
ucaagccaugcuuccugugcccccaguggggcccuggcuucaauccuucugcacguucaaaguuugcgaugagacacuugaacgugagaaggauggaaguccgggcacccccagcucuggagccugacaaggaggaca

SEQ ID NO: 2149 - DNA, 22 bp, Artificial Sequence
  Guide Sequence
aaatcgtagactgaggcagtcc

SEQ ID NO: 2150 - DNA, 21 bp, Artificial Sequence
  Passenger Sequence
acggcctcagtgctacgattt

SEQ ID NO: 2151 - DNA, 138 bp, Artificial Sequence
  miR Cassette
tcaagccatgcttcctgtgcccccagtggggccctggctacggcctcagtgctacgatttagtttgcgatgagacacaaatcgtagactgaggcagtagtccgggcacccccagctctggagcctgacaaggaggaca

SEQ ID NO: 2152 - RNA, 22 nt, Artificial Sequence
  Guide Sequence
aaaucguagacugaggcagucc

SEQ ID NO: 2153 - RNA, 21 nt, Artificial Sequence
  Passenger Sequence
acggccucagugcuacgauuu

SEQ ID NO: 2154 - RNA, 138 nt, Artificial Sequence
  miR Cassette
ucaagccaugcuuccugugcccccaguggggcccuggcuacggccucagugcuacgauuuaguuugcgaugagacacaaaucguagacugaggcaguaguccgggcacccccagcucuggagccugacaaggaggaca

SEQ ID NO: 2155 - DNA, 21 bp, Artificial Sequence
  Passenger Sequence
cccaatcagccgccttgttca

SEQ ID NO: 2156 - DNA, 138 bp, Artificial Sequence
  miR Cassette
tcaagccatgcttcctgtgcccccagtggggccctggctcccaatcagccgccttgttcaagtttgcgatgagacactgaacaaggggctgatttggagtccgggcacccccagctctggagcctgacaaggaggaca

SEQ ID NO: 2157 - RNA, 21 nt, Artificial Sequence
  Passenger Sequence
cccaaucagccgccuuguuca

SEQ ID NO: 2158 - RNA, 138 nt, Artificial Sequence
  miR Cassette
ucaagccaugcuuccugugcccccaguggggcccuggcucccaaucagccgccuuguucaaguuugcgaugagacacugaacaaggggcugauuuggaguccgggcacccccagcucuggagccugacaaggaggaca

SEQ ID NO: 2159 - DNA, 21 bp, Artificial Sequence
  Passenger Sequence
cggtccttctcatcagccaaa

SEQ ID NO: 2160 - DNA, 138 bp, Artificial Sequence
  miR Cassette
tcaagccatgcttcctgtgcccccagtggggccctggctcggtccttctcatcagccaaaagtttgcgatgagacactttggctgagagaaggaacgagtccgggcacccccagctctggagcctgacaaggaggaca

SEQ ID NO: 2161 - RNA, 21 nt, Artificial Sequence
  Passenger Sequence
cgguccuucucaucagccaaa

SEQ ID NO: 2162 - RNA, 138 nt, Artificial Sequence
  miR Cassette
ucaagccaugcuuccugugcccccaguggggcccuggcucgguccuucucaucagccaaaaguuugcgaugagacacuuuggcugagagaaggaacgaguccgggcacccccagcucuggagccugacaaggaggaca

SEQ ID NO: 2163 - DNA, 21 bp, Artificial Sequence
  Passenger Sequence
cgctccatcctatctcacgtt

SEQ ID NO: 2164 - DNA, 138 bp, Artificial Sequence
  miR Cassette
tcaagccatgcttcctgtgcccccagtggggccctggctcgctccatcctatctcacgttagtttgcgatgagacacaacgtgagaaggatggatcgagtccgggcacccccagctctggagcctgacaaggaggaca

SEQ ID NO: 2165 - RNA, 21 nt, Artificial Sequence
  Passenger Sequence
cgcuccauccuaucucacguu

SEQ ID NO: 2166 - RNA, 138 nt, Artificial Sequence
  miR Cassette
ucaagccaugcuuccugugcccccaguggggcccuggcucgcuccauccuaucucacguuaguuugcgaugagacacaacgugagaaggauggaucgaguccgggcacccccagcucuggagccugacaaggaggaca

SEQ ID NO: 2167 - DNA, 21 bp, Artificial Sequence
  Passenger Sequence
ccggctagtccatgcatcgaa

SEQ ID NO: 2168 - DNA, 138 bp, Artificial Sequence
  miR Cassette
tcaagccatgcttcctgtgcccccagtggggccctggctccggctagtccatgcatcgaaagtttgcgatgagacacttcgatgcaggactagcaggagtccgggcacccccagctctggagcctgacaaggaggaca

SEQ ID NO: 2169 - RNA, 21 nt, Artificial Sequence
  Passenger Sequence
ccggcuaguccaugcaucgaa

SEQ ID NO: 2170 - RNA, 138 nt, Artificial Sequence
  miR Cassette
ucaagccaugcuuccugugcccccaguggggcccuggcuccggcuaguccaugcaucgaaaguuugcgaugagacacuucgaugcaggacuagcaggaguccgggcacccccagcucuggagccugacaaggaggaca

SEQ ID NO: 2171 - DNA, 20 bp, Artificial Sequence
  Passenger Sequence
agcagttcgagaattccagt

SEQ ID NO: 2172 - DNA, 138 bp, Artificial Sequence
  miR Cassette
ctggaggcttgctttgggctgtatgctgactggaatttctctgaactgctttttggcctctgactgaagcagttcgagaattccagtcaggacaaggccctttatcagcactcacatggaacaaatggccaccgtggg

SEQ ID NO: 2173 - RNA, 20 nt, Artificial Sequence
  Passenger Sequence
agcaguucgagaauuccagu

SEQ ID NO: 2174 - RNA, 138 nt, Artificial Sequence
  miR Cassette
cuggaggcuugcuuugggcuguaugcugacuggaauuucucugaacugcuuuuuggccucugacugaagcaguucgagaauuccagucaggacaaggcccuuuaucagcacucacauggaacaaauggccaccguggg

SEQ ID NO: 2175 - DNA, 138 bp, Artificial Sequence
  miR Cassette
ctggaggcttgctttgggctgtatgctgtgagttatctctttctaagggcttttggcctctgactgagcccttagaaggataactcacaggacaaggccctttatcagcactcacatggaacaaatggccaccgtggg

SEQ ID NO: 2176 - RNA, 138 nt, Artificial Sequence
  miR Cassette
cuggaggcuugcuuugggcuguaugcugugaguuaucucuuucuaagggcuuuuggccucugacugagcccuuagaaggauaacucacaggacaaggcccuuuaucagcacucacauggaacaaauggccaccguggg

SEQ ID NO: 2177 - DNA, 20 bp, Artificial Sequence
  Passenger Sequence
acgcaatagttcctacagta

SEQ ID NO: 2178 - DNA, 138 bp, Artificial Sequence
  miR Cassette
ctggaggcttgctttgggctgtatgctgtactgtaggcaacatattgcgtttttggcctctgactgaacgcaatagttcctacagtacaggacaaggccctttatcagcactcacatggaacaaatggccaccgtggg

SEQ ID NO: 2179 - RNA, 20 nt, Artificial Sequence
  Passenger Sequence
acgcaauaguuccuacagua

SEQ ID NO: 2180 - RNA, 138 nt, Artificial Sequence
  miR Cassette
cuggaggcuugcuuugggcuguaugcuguacuguaggcaacauauugcguuuuuggccucugacugaacgcaauaguuccuacaguacaggacaaggcccuuuaucagcacucacauggaacaaauggccaccguggg

SEQ ID NO: 2181 - DNA, 138 bp, Artificial Sequence
  miR Cassette
gagctcagtcaaacctggatgccttttctgcaggcctctgtgattgcgtggagtaagctggtggtgttatttaatccaccaagcttactccacgcacgctacagtgtcttgccctgtctccgggggttcctaataaag

SEQ ID NO: 2182 - RNA, 138 nt, Artificial Sequence
  miR Cassette
gagcucagucaaaccuggaugccuuuucugcaggccucugugauugcguggaguaagcuggugguguuauuuaauccaccaagcuuacuccacgcacgcuacagugucuugcccugucuccggggguuccuaauaaag

SEQ ID NO: 2183 - DNA, 138 bp, Artificial Sequence
  miR Cassette
gagctcagtcaaacctggatgccttttctgcaggcctctgtgatagacatgaggatgctgagactgttatttaatccagtcagcatcctcatgtctcgctacagtgtcttgccctgtctccgggggttcctaataaag

SEQ ID NO: 2184 - RNA, 138 nt, Artificial Sequence
  miR Cassette
gagcucagucaaaccuggaugccuuuucugcaggccucugugauagacaugaggaugcugagacuguuauuuaauccagucagcauccucaugucucgcuacagugucuugcccugucuccggggguuccuaauaaag

SEQ ID NO: 2185 - DNA, 20 bp, Artificial Sequence
  Passenger Sequence
gcctagaaagagataactac

SEQ ID NO: 2186 - DNA, 138 bp, Artificial Sequence
  miR Cassette
gagctcagtcaaacctggatgccttttctgcaggcgtctgtgtgagttatctctttctaagggctgttatttaatccagcctagaaagagataactacctacagtctcttgccctgtctccgggggttcctaataaag

SEQ ID NO: 2187 - RNA, 138 nt, Artificial Sequence
  miR Cassette
gagcucagucaaaccuggaugccuuuucugcaggcgucugugugaguuaucucuuucuaagggcuguuauuuaauccagccuagaaagagauaacuaccuacagucucuugcccugucuccggggguuccuaauaaag

SEQ ID NO: 2188 - DNA, 138 bp, Artificial Sequence
  miR Cassette
gagctcagtcaaacctggatgccttttctgcaggcgtctgtgtatgctgagactgataatgtggtgttatttaatccaccattatcagtctcagcaccctacagtctcttgccctgtctccgggggttcctaataaag

SEQ ID NO: 2189 - RNA, 138 nt, Artificial Sequence
  miR Cassette
gagcucagucaaaccuggaugccuuuucugcaggcgucuguguaugcugagacugauaaugugguguuauuuaauccaccauuaucagucucagcacccuacagucucuugcccugucuccggggguuccuaauaaag

SEQ ID NO: 2190 - DNA, 138 bp, Artificial Sequence
  miR Cassette
cctggaggcttgctgaaggctgtatgctgaggactgtaggcaacatattgcttttggccactgactgagcaatatgtgctacagtcctcaggacacaaggcctgttactagcactcacatggaacaaatggccaccgg

SEQ ID NO: 2191 - RNA, 138 nt, Artificial Sequence
  miR Cassette
ccuggaggcuugcugaaggcuguaugcugaggacuguaggcaacauauugcuuuuggccacugacugagcaauaugugcuacaguccucaggacacaaggccuguuacuagcacucacauggaacaaauggccaccgg

SEQ ID NO: 2192 - DNA, 138 bp, Artificial Sequence
  miR Cassette
cctggaggcttgctgaaggctgtatgctgtcgggttgaaatctgaagtgtgttttggccactgactgacacacttcgattcaacccgacaggacacaaggcctgttactagcactcacatggaacaaatggccaccgg

SEQ ID NO: 2193 - RNA, 138 nt, Artificial Sequence
  miR Cassette
ccuggaggcuugcugaaggcuguaugcugucggguugaaaucugaaguguguuuuggccacugacugacacacuucgauucaacccgacaggacacaaggccuguuacuagcacucacauggaacaaauggccaccgg

SEQ ID NO: 2194 - DNA, 138 bp, Artificial Sequence
  miR Cassette
cctggaggcttgctgaaggctgtatgctgaactgtaccacaacaaagtctgttttggccactgactgacagactttttgggtacagttcaggacacaaggcctgttactagcactcacatggaacaaatggccaccgg

SEQ ID NO: 2195 - RNA, 138 nt, Artificial Sequence
  miR Cassette
ccuggaggcuugcugaaggcuguaugcugaacuguaccacaacaaagucuguuuuggccacugacugacagacuuuuuggguacaguucaggacacaaggccuguuacuagcacucacauggaacaaauggccaccgg

SEQ ID NO: 2196 - DNA, 138 bp, Artificial Sequence
  miR Cassette
cctggaggcttgctgaaggctgtatgctgactggaatttctctgaactgctttttggccactgactgaagcagttcgagaattccagtcaggacacaaggcctgttactagcactcacatggaacaaatggccaccgg

SEQ ID NO: 2197 - RNA, 138 nt, Artificial Sequence
  miR Cassette
ccuggaggcuugcugaaggcuguaugcugacuggaauuucucugaacugcuuuuuggccacugacugaagcaguucgagaauuccagucaggacacaaggccuguuacuagcacucacauggaacaaauggccaccgg

SEQ ID NO: 2198 - DNA, 138 bp, Artificial Sequence
  miR Cassette
cctggaggcttgctgaaggctgtatgctgtaggactgtaggcaacatattgttttggccactgactgacaatatgtgccacagtcctacaggacacaaggcctgttactagcactcacatggaacaaatggccaccgg

SEQ ID NO: 2199 - RNA, 138 nt, Artificial Sequence
  miR Cassette
ccuggaggcuugcugaaggcuguaugcuguaggacuguaggcaacauauuguuuuggccacugacugacaauaugugccacaguccuacaggacacaaggccuguuacuagcacucacauggaacaaauggccaccgg

SEQ ID NO: 2200 - DNA, 22 bp, Artificial Sequence
  Guide Sequence
tctgatttgggaactgctgagg

SEQ ID NO: 2201 - DNA, 20 bp, Artificial Sequence
  Passenger Sequence
cctcagcattccaaatcaga

SEQ ID NO: 2202 - DNA, 138 bp, Artificial Sequence
  miR Cassette
cctggaggcttgctgaaggctgtatgctgtctgatttgggaactgctgaggttttggccactgactgacctcagcattccaaatcagacaggacacaaggcctgttactagcactcacatggaacaaatggccaccgg

SEQ ID NO: 2203 - RNA, 22 nt, Artificial Sequence
  Guide Sequence
ucugauuugggaacugcugagg

SEQ ID NO: 2204 - RNA, 20 nt, Artificial Sequence
  Passenger Sequence
ccucagcauuccaaaucaga

SEQ ID NO: 2205 - RNA, 138 nt, Artificial Sequence
  miR Cassette
ccuggaggcuugcugaaggcuguaugcugucugauuugggaacugcugagguuuuggccacugacugaccucagcauuccaaaucagacaggacacaaggccuguuacuagcacucacauggaacaaauggccaccgg

SEQ ID NO: 2206 - DNA, 22 bp, Artificial Sequence
  Guide Sequence
tgtgggttgaactcctttgcat

SEQ ID NO: 2207 - DNA, 20 bp, Artificial Sequence
  Passenger Sequence
atgcaaagagtcaacccaca

SEQ ID NO: 2208 - DNA, 138 bp, Artificial Sequence
  miR Cassette
cctggaggcttgctgaaggctgtatgctgtgtgggttgaactcctttgcatttttggccactgactgaatgcaaagagtcaacccacacaggacacaaggcctgttactagcactcacatggaacaaatggccaccgg

SEQ ID NO: 2209 - RNA, 22 nt, Artificial Sequence
  Guide Sequence
uguggguugaacuccuuugcau

SEQ ID NO: 2210 - RNA, 20 nt, Artificial Sequence
  Passenger Sequence
augcaaagagucaacccaca

SEQ ID NO: 2211 - RNA, 138 nt, Artificial Sequence
  miR Cassette
ccuggaggcuugcugaaggcuguaugcuguguggguugaacuccuuugcauuuuuggccacugacugaaugcaaagagucaacccacacaggacacaaggccuguuacuagcacucacauggaacaaauggccaccgg

SEQ ID NO: 2212 - DNA, 20 bp, Artificial Sequence
  Forward primer - EF1A_F_intron
ccaggcacctcgattagttc

SEQ ID NO: 2213 - DNA, 28 bp, Artificial Sequence
  Forward Primer - DS2-EF1A-READ1
aagtaagcctgcaggaattgcctagggt

SEQ ID NO: 2214 - DNA, 57 bp, Artificial Sequence
  Forward Primer - P5-DS2-FW
aatgatacggcgaccaccgagatctacacaagtaagcctgcaggaattgcctagggt

SEQ ID NO: 2215 - DNA, 90 bp, Artificial Sequence
  Reverse primer - P7-DS2-RV_1
caagcagaagacggcatacgagatcttgtagtgactggagttcagacgtgtgctcttccgatctacatgtctcgacctggcttactagtg

SEQ ID NO: 2216 - DNA, 90 bp, Artificial Sequence
  Reverse primer - P7-DS2-RV_2
caagcagaagacggcatacgagatgccaatgtgactggagttcagacgtgtgctcttccgatctacatgtctcgacctggcttactagtg

SEQ ID NO: 2217 - DNA, 90 bp, Artificial Sequence
  Reverse primer - P7-DS2-RV_3
caagcagaagacggcatacgagatagttccgtgactggagttcagacgtgtgctcttccgatctacatgtctcgacctggcttactagtg

SEQ ID NO: 2218 - DNA, 90 bp, Artificial Sequence
  Reverse primer - P7-DS2-RV_4
caagcagaagacggcatacgagattagcttgtgactggagttcagacgtgtgctcttccgatctacatgtctcgacctggcttactagtg

SEQ ID NO: 2219 - DNA, 90 bp, Artificial Sequence
  Reverse primer - P7-DS2-RV_5
caagcagaagacggcatacgagatttaggcgtgactggagttcagacgtgtgctcttccgatctacatgtctcgacctggcttactagtg

SEQ ID NO: 2220 - DNA, 90 bp, Artificial Sequence
  Reverse primer - P7-DS2-RV_6
caagcagaagacggcatacgagatatcacggtgactggagttcagacgtgtgctcttccgatctacatgtctcgacctggcttactagtg

SEQ ID NO: 2221 - DNA, 90 bp, Artificial Sequence
  Reverse primer - P7-DS2-RV_7
caagcagaagacggcatacgagatgagtgggtgactggagttcagacgtgtgctcttccgatctacatgtctcgacctggcttactagtg

SEQ ID NO: 2222 - DNA, 90 bp, Artificial Sequence
  Reverse primer - P7-DS2-RV_8
caagcagaagacggcatacgagatagtcaagtgactggagttcagacgtgtgctcttccgatctacatgtctcgacctggcttactagtg

SEQ ID NO: 2223 - DNA, 90 bp, Artificial Sequence
  Reverse primer - P7-DS2-RV_9
caagcagaagacggcatacgagatacagtggtgactggagttcagacgtgtgctcttccgatctacatgtctcgacctggcttactagtg

SEQ ID NO: 2224 - DNA, 90 bp, Artificial Sequence
  Reverse primer - P7-DS2-RV_10
caagcagaagacggcatacgagattgaccagtgactggagttcagacgtgtgctcttccgatctacatgtctcgacctggcttactagtg

SEQ ID NO: 2225 - DNA, 90 bp, Artificial Sequence
  Reverse primer - P7-DS2-RV_11
caagcagaagacggcatacgagatcagatcgtgactggagttcagacgtgtgctcttccgatctacatgtctcgacctggcttactagtg

SEQ ID NO: 2226 - DNA, 90 bp, Artificial Sequence
  Reverse primer - P7-DS2-RV_12
caagcagaagacggcatacgagatggctacgtgactggagttcagacgtgtgctcttccgatctacatgtctcgacctggcttactagtg

SEQ ID NO: 2227 - DNA, 40 bp, Artificial Sequence
  Forward primer - miR-1-1-AAV-H1-AMELY-V1-AarI-FW
taagttctgtatgagaccaccatgcagactgcctgcttgg

SEQ ID NO: 2228 - DNA, 40 bp, Artificial Sequence
  Forward primer - miR-100-AAV-H1-AMELY-V1-AarI-FW
taagttctgtatgagaccaccccaaaagagagaagatatt

SEQ ID NO: 2229 - DNA, 40 bp, Artificial Sequence
  Forward primer - miR-124-AAV-H1-AMELY-V1-AarI-FW
taagttctgtatgagaccacttccttcctcaggagaaagg

SEQ ID NO: 2230 - DNA, 40 bp, Artificial Sequence
  Forward primer - miR-128-AAV-H1-AMELY-V1-AarI-FW
taagttctgtatgagaccacattttgcaataattggcctt

SEQ ID NO: 2231 - DNA, 40 bp, Artificial Sequence
  Forward primer - miR-122-AAV-H1-AMELY-V1-AarI-FW
taagttctgtatgagaccacggctacagagtttccttagc

SEQ ID NO: 2232 - DNA, 40 bp, Artificial Sequence
  Forward primer - miR-130a-AAV-H1-AMELY-V1-AarI-FW
taagttctgtatgagaccacgcagggccggcatgcctctg

SEQ ID NO: 2233 - DNA, 40 bp, Artificial Sequence
  Forward primer - miR-132-AAV-H1-AMELY-V1-AarI-FW
taagttctgtatgagaccacgccgtccgcgcgccccgccc

SEQ ID NO: 2234 - DNA, 40 bp, Artificial Sequence
  Forward primer - miR-138-2-AAV-H1-AMELY-V1-AarI-FW
taagttctgtatgagaccacgccggcggagttctggtatc

SEQ ID NO: 2235 - DNA, 40 bp, Artificial Sequence
  Forward primer - miR-144-AAV-H1-AMELY-V1-AarI-FW
taagttctgtatgagaccactcaagccatgcttcctgtgc

SEQ ID NO: 2236 - DNA, 40 bp, Artificial Sequence
  Forward primer - miR-155-M-AAV-H1-AMELY-V1-AarI-FW
taagttctgtatgagaccaccctggaggcttgctgaaggc

SEQ ID NO: 2237 - DNA, 40 bp, Artificial Sequence
  Forward primer - miR-155E-AAV-H1-AMELY-V1-AarI-FW
taagttctgtatgagaccacctggaggcttgctttgggct

SEQ ID NO: 2238 - DNA, 40 bp, Artificial Sequence
  Forward primer - miR-16-2-AAV-H1-AMELY-V1-AarI-FW
taagttctgtatgagaccacttatgtttggatgaactgac

SEQ ID NO: 2239 - DNA, 40 bp, Artificial Sequence
  Forward primer - miR-190a-AAV-H1-AMELY-V1-AarI-FW
taagttctgtatgagaccacgagctcagtcaaacctggat

SEQ ID NO: 2240 - DNA, 40 bp, Artificial Sequence
  Forward primer - miR-223-AAV-H1-AMELY-V1-AarI-FW
taagttctgtatgagaccactccccacagaagctcttggc

SEQ ID NO: 2241 - DNA, 40 bp, Artificial Sequence
  Forward primer - miR-451a-AAV-H1-AMELY-V1-AarI-FW
taagttctgtatgagaccacgctctctgctcagcctgtca

SEQ ID NO: 2242 - DNA, 44 bp, Artificial Sequence
  Reverse primer - miR-1-1-AAV-H1-AMELY-V1-AarI-RV
tatgtgatatgcataataaaaaaaggcccccgtggtgtggagtg

SEQ ID NO: 2243 - DNA, 44 bp, Artificial Sequence
  Reverse primer - miR-100-AAV-H1-AMELY-V1-AarI-RV
tatgtgatatgcataataaaaaaaggcatataagcaaagcccca

SEQ ID NO: 2244 - DNA, 44 bp, Artificial Sequence
  Reverse primer - miR-124-AAV-H1-AMELY-V1-AarI-RV
tatgtgatatgcataataaaaaaatccttggcgggccctcgccg

SEQ ID NO: 2245 - DNA, 44 bp, Artificial Sequence
  Reverse primer - miR-128-AAV-H1-AMELY-V1-AarI-RV
tatgtgatatgcataataaaaaaaagcagtggaaacctgagtaa

SEQ ID NO: 2246 - DNA, 44 bp, Artificial Sequence
  Reverse primer - miR-122-AAV-H1-AMELY-V1-AarI-RV
tatgtgatatgcataataaaaaaacaaagcaaacgatgccaaga

SEQ ID NO: 2247 - DNA, 44 bp, Artificial Sequence
  Reverse primer - miR-130a-AAV-H1-AMELY-V1-AarI-RV
tatgtgatatgcataataaaaaaacaatgctgaggaggcagcca

SEQ ID NO: 2248 - DNA, 44 bp, Artificial Sequence
  Reverse primer - miR-132-AAV-H1-AMELY-V1-AarI-RV
tatgtgatatgcataataaaaaaaggctcggggcgcggcgtggc

SEQ ID NO: 2249 - DNA, 44 bp, Artificial Sequence
  Reverse primer - miR-138-2-AAV-H1-AMELY-V1-AarI-RV
tatgtgatatgcataataaaaaaaccggtcccacgaggctcgcc

SEQ ID NO: 2250 - DNA, 44 bp, Artificial Sequence
  Reverse primer - miR-144-AAV-H1-AMELY-V1-AarI-RV
tatgtgatatgcataataaaaaaatgtcctccttgtcaggctcc

SEQ ID NO: 2251 - DNA, 44 bp, Artificial Sequence
  Reverse primer - miR-155-M-AAV-H1-AMELY-V1-AarI-RV
tatgtgatatgcataataaaaaaaccggtggccatttgttccat

SEQ ID NO: 2252 - DNA, 44 bp, Artificial Sequence
  Reverse primer - miR-155E-AAV-H1-AMELY-V1-AarI-RV
tatgtgatatgcataataaaaaaacccacggtggccatttgttc

SEQ ID NO: 2253 - DNA, 44 bp, Artificial Sequence
  Reverse primer - miR-16-2-AAV-H1-AMELY-V1-AarI-RV
tatgtgatatgcataataaaaaaaaaacaattgataaaatagtt

SEQ ID NO: 2254 - DNA, 44 bp, Artificial Sequence
  Reverse primer - miR-190a-AAV-H1-AMELY-V1-AarI-RV
tatgtgatatgcataataaaaaaactttattaggaacccccgga

SEQ ID NO: 2255 - DNA, 44 bp, Artificial Sequence
  Reverse primer - miR-223-AAV-H1-AMELY-V1-AarI-RV
tatgtgatatgcataataaaaaaaggcctagagctggtaagcat

SEQ ID NO: 2256 - DNA, 44 bp, Artificial Sequence
  Reverse primer - miR-451a-AAV-H1-AMELY-V1-AarI-RV
tatgtgatatgcataataaaaaaactgagttctcttcctggcac

SEQ ID NO: 2257 - DNA, 2358 bp, Artificial Sequence
  scAAV_H1_long_miR100_1755_PSG11_V5_ITR_to_ITR
  misc_feature (1)..(106): 5' ITR
  misc_feature (113)..(343): H1 promoter
  misc_feature (344)..(481): miR100_1755
  misc_feature (482)..(488): terminator
  misc_feature (489)..(2185): PSG11_V5
  misc_feature (2192)..(2358): 3' ITR
ctgcgcgctcgctcgctcactgaggccgcccgggcaaagcccgggcgtcgggcgacctttggtcgcccggcctcagtgagcgagcgagcgcgcagagagggagtggacgcgtggaattcgaacgctgacgtcatcaacccgctccaaggaatcgcgggcccagtgtcactaggcgggaacacccagcgcgcgtgcgccctggcaggaagatggctgtgagggacaggggagtggcgccctgcaatatttgcatgtcgctatgtgttctgggaaatcaccataaacgtgaaatgtctttggatttgggaatcttataagttctgtatgagaccactctttcccacccaaaagagagaagatattgaggcctgttgccacatcgggttgaaatctgaagtgtggtattagtccgcacactccagctttcaaaccgttgtgtctgttaggcaatctcacggacctggggctttgcttatatgcctttttttaccaggtcagttgttgcttgtgaagaagggtgtggttaagtctgcagtgcagaaggtggaagggatttcactctgtttttagagataggattggaactaagaattttaagtctatttgggtgaaggggcagggaagtgtaggaagacagttctaattaggaaggaggaattatactaggaagtagaggtaaaggaagtgagaaggcttagtaaatagaagaaatctgaacttatcaaataggctagtgtatacccctggagattcttgattaagtgaattaactagattttagaaaggtattgaggcagttatttgcaaggaacaattcaaagtctggagacaagaagtcaagcaatactttgagaagtggttgagctttttgggattggagagaattacactattgagatttgttaaaaatattgaagaaggtttcaccttgtgaaattgtgtttctcaattgaatctgagaaacaattgagcagaggctggagataattttgtctaaaagacagtggggtacagggagcaaaaaggccagggagaaagggaactgcaggaattagtgctgagaagcaggagttagtggttgaaggaggagatccaggcccagatacaggcaaataagtcaattccctctcccaagcttggcagtcagccctgcaggaaccaggataagagaaattgtttggtaaaaactaacaaaccaggcttgattctttgcagttagctctttatctttctctcccacaagtagtcagtagccttgttctagtgttttttgtgttacctctttttcctgaaaaaggaaggtactgttgagttattgttgttgatagtaatatagtagctgacagtggttcctctgtttgtggcaacttgtttcccacctaaattgcacacttagaaacagttattggtaagccttatattagatatatatagtgtctggtagtcttaccctctctataattacacactttttggcactgcccctttcctgccttgcagagccccaggggtgaatcttcctatttctccagctctgcaacagtcactgtactcagtgctgtgtcccacctgctgtgcccacagcctcaaacagccagtgacttcagagccaggaaacagctcaggagtctgccctgaggttgcttctcttcttatttccttgcagcctggccaaggggaggcttggcttgaactggcagctcaatttagccaaattcaggacaggccaccaggactctttctccacacttgctggtcccaccccaggttgagtgaggcagggccagtcaccagaggagcccagagcagagcaggaagcagagtctgagctgctcctccctcacccaaggggcttcctcctctcaattgggggaaaagtgtgagcttgtttcaaagcctcagttgttccttgtagttcttggaagaggtacaagaaaacaaagacctgacagaaggggttgaggtggtgacagtgagaagcaactggttgttcagcactctccttcttgtccctctgtgaagcctcttctaccacaaagggctcagggctgataaagccccctccctacctttctcaggccagacacaaggtcagtcttgagaaaacagaaaaaaaaggagaagagagtctgtagagacaaattgggagggttcaggaggagaatttgggatttgcctgtgcccagctagcgtagataagtagcatggcgggttaatcattaactacaaggaacccctagtgatggagttggccactccctctctgcgcgctcgctcgctcactgaggccgggcgaccaaaggtcgcccgacgcccgggctttgcccgggcggcctcagtgagcgagcgagcgcgcag

SEQ ID NO: 2258 - DNA, 2358 bp, Artificial Sequence
  scAAV_H1_long_miR100_2586_PSG11_V5_ITR_to_ITR
  misc_feature (1)..(106): 5' ITR
  misc_feature (113)..(343): H1 promoter
  misc_feature (344)..(481): miR100_2586
  misc_feature (482)..(488): terminator
  misc_feature (489)..(2185): PSG11_V5
  misc_feature (2192)..(2358): 3' ITR
ctgcgcgctcgctcgctcactgaggccgcccgggcaaagcccgggcgtcgggcgacctttggtcgcccggcctcagtgagcgagcgagcgcgcagagagggagtggacgcgtggaattcgaacgctgacgtcatcaacccgctccaaggaatcgcgggcccagtgtcactaggcgggaacacccagcgcgcgtgcgccctggcaggaagatggctgtgagggacaggggagtggcgccctgcaatatttgcatgtcgctatgtgttctgggaaatcaccataaacgtgaaatgtctttggatttgggaatcttataagttctgtatgagaccactctttcccacccaaaagagagaagatattgaggcctgttgccacatagattcagaagtagaacttgggtattagtccgccaagtcctaattctgactctttgtgtctgttaggcaatctcacggacctggggctttgcttatatgcctttttttaccaggtcagttgttgcttgtgaagaagggtgtggttaagtctgcagtgcagaaggtggaagggatttcactctgtttttagagataggattggaactaagaattttaagtctatttgggtgaaggggcagggaagtgtaggaagacagttctaattaggaaggaggaattatactaggaagtagaggtaaaggaagtgagaaggcttagtaaatagaagaaatctgaacttatcaaataggctagtgtatacccctggagattcttgattaagtgaattaactagattttagaaaggtattgaggcagttatttgcaaggaacaattcaaagtctggagacaagaagtcaagcaatactttgagaagtggttgagctttttgggattggagagaattacactattgagatttgttaaaaatattgaagaaggtttcaccttgtgaaattgtgtttctcaattgaatctgagaaacaattgagcagaggctggagataattttgtctaaaagacagtggggtacagggagcaaaaaggccagggagaaagggaactgcaggaattagtgctgagaagcaggagttagtggttgaaggaggagatccaggcccagatacaggcaaataagtcaattccctctcccaagcttggcagtcagccctgcaggaaccaggataagagaaattgtttggtaaaaactaacaaaccaggcttgattctttgcagttagctctttatctttctctcccacaagtagtcagtagccttgttctagtgttttttgtgttacctctttttcctgaaaaaggaaggtactgttgagttattgttgttgatagtaatatagtagctgacagtggttcctctgtttgtggcaacttgtttcccacctaaattgcacacttagaaacagttattggtaagccttatattagatatatatagtgtctggtagtcttaccctctctataattacacactttttggcactgcccctttcctgccttgcagagccccaggggtgaatcttcctatttctccagctctgcaacagtcactgtactcagtgctgtgtcccacctgctgtgcccacagcctcaaacagccagtgacttcagagccaggaaacagctcaggagtctgccctgaggttgcttctcttcttatttccttgcagcctggccaaggggaggcttggcttgaactggcagctcaatttagccaaattcaggacaggccaccaggactctttctccacacttgctggtcccaccccaggttgagtgaggcagggccagtcaccagaggagcccagagcagagcaggaagcagagtctgagctgctcctccctcacccaaggggcttcctcctctcaattgggggaaaagtgtgagcttgtttcaaagcctcagttgttccttgtagttcttggaagaggtacaagaaaacaaagacctgacagaaggggttgaggtggtgacagtgagaagcaactggttgttcagcactctccttcttgtccctctgtgaagcctcttctaccacaaagggctcagggctgataaagccccctccctacctttctcaggccagacacaaggtcagtcttgagaaaacagaaaaaaaaggagaagagagtctgtagagacaaattgggagggttcaggaggagaatttgggatttgcctgtgcccagctagcgtagataagtagcatggcgggttaatcattaactacaaggaacccctagtgatggagttggccactccctctctgcgcgctcgctcgctcactgaggccgggcgaccaaaggtcgcccgacgcccgggctttgcccgggcggcctcagtgagcgagcgagcgcgcag

SEQ ID NO: 2259 - DNA, 2358 bp, Artificial Sequence
  scAAV_H1_long_miR100_2945_PSG11_V5_ITR_to_ITR
  misc_feature (1)..(106): 5' ITR
  misc_feature (113)..(343): H1 promoter
  misc_feature (344)..(481): miR100_2945
  misc_feature (482)..(488): terminator
  misc_feature (489)..(2185): PSG11_V5
  misc_feature (2192)..(2358): 3' ITR
ctgcgcgctcgctcgctcactgaggccgcccgggcaaagcccgggcgtcgggcgacctttggtcgcccggcctcagtgagcgagcgagcgcgcagagagggagtggacgcgtggaattcgaacgctgacgtcatcaacccgctccaaggaatcgcgggcccagtgtcactaggcgggaacacccagcgcgcgtgcgccctggcaggaagatggctgtgagggacaggggagtggcgccctgcaatatttgcatgtcgctatgtgttctgggaaatcaccataaacgtgaaatgtctttggatttgggaatcttataagttctgtatgagaccactctttcccacccaaaagagagaagatattgaggcctgttgccacatgtagtagaaggctttggctgagtattagtccgtcagcccaagacttctaatacttgtgtctgttaggcaatctcacggacctggggctttgcttatatgcctttttttaccaggtcagttgttgcttgtgaagaagggtgtggttaagtctgcagtgcagaaggtggaagggatttcactctgtttttagagataggattggaactaagaattttaagtctatttgggtgaaggggcagggaagtgtaggaagacagttctaattaggaaggaggaattatactaggaagtagaggtaaaggaagtgagaaggcttagtaaatagaagaaatctgaacttatcaaataggctagtgtatacccctggagattcttgattaagtgaattaactagattttagaaaggtattgaggcagttatttgcaaggaacaattcaaagtctggagacaagaagtcaagcaatactttgagaagtggttgagctttttgggattggagagaattacactattgagatttgttaaaaatattgaagaaggtttcaccttgtgaaattgtgtttctcaattgaatctgagaaacaattgagcagaggctggagataattttgtctaaaagacagtggggtacagggagcaaaaaggccagggagaaagggaactgcaggaattagtgctgagaagcaggagttagtggttgaaggaggagatccaggcccagatacaggcaaataagtcaattccctctcccaagcttggcagtcagccctgcaggaaccaggataagagaaattgtttggtaaaaactaacaaaccaggcttgattctttgcagttagctctttatctttctctcccacaagtagtcagtagccttgttctagtgttttttgtgttacctctttttcctgaaaaaggaaggtactgttgagttattgttgttgatagtaatatagtagctgacagtggttcctctgtttgtggcaacttgtttcccacctaaattgcacacttagaaacagttattggtaagccttatattagatatatatagtgtctggtagtcttaccctctctataattacacactttttggcactgcccctttcctgccttgcagagccccaggggtgaatcttcctatttctccagctctgcaacagtcactgtactcagtgctgtgtcccacctgctgtgcccacagcctcaaacagccagtgacttcagagccaggaaacagctcaggagtctgccctgaggttgcttctcttcttatttccttgcagcctggccaaggggaggcttggcttgaactggcagctcaatttagccaaattcaggacaggccaccaggactctttctccacacttgctggtcccaccccaggttgagtgaggcagggccagtcaccagaggagcccagagcagagcaggaagcagagtctgagctgctcctccctcacccaaggggcttcctcctctcaattgggggaaaagtgtgagcttgtttcaaagcctcagttgttccttgtagttcttggaagaggtacaagaaaacaaagacctgacagaaggggttgaggtggtgacagtgagaagcaactggttgttcagcactctccttcttgtccctctgtgaagcctcttctaccacaaagggctcagggctgataaagccccctccctacctttctcaggccagacacaaggtcagtcttgagaaaacagaaaaaaaaggagaagagagtctgtagagacaaattgggagggttcaggaggagaatttgggatttgcctgtgcccagctagcgtagataagtagcatggcgggttaatcattaactacaaggaacccctagtgatggagttggccactccctctctgcgcgctcgctcgctcactgaggccgggcgaccaaaggtcgcccgacgcccgggctttgcccgggcggcctcagtgagcgagcgagcgcgcag

SEQ ID NO: 2260 - DNA, 2358 bp, Artificial Sequence
  scAAV_H1_long_miR100_3330_PSG11_V5_ITR_to_ITR
  misc_feature (1)..(106): 5' ITR
  misc_feature (113)..(343): H1 promoter
  misc_feature (344)..(481): miR100_3330
  misc_feature (482)..(488): terminator
  misc_feature (489)..(2185): PSG11_V5
  misc_feature (2192)..(2358): 3' ITR
ctgcgcgctcgctcgctcactgaggccgcccgggcaaagcccgggcgtcgggcgacctttggtcgcccggcctcagtgagcgagcgagcgcgcagagagggagtggacgcgtggaattcgaacgctgacgtcatcaacccgctccaaggaatcgcgggcccagtgtcactaggcgggaacacccagcgcgcgtgcgccctggcaggaagatggctgtgagggacaggggagtggcgccctgcaatatttgcatgtcgctatgtgttctgggaaatcaccataaacgtgaaatgtctttggatttgggaatcttataagttctgtatgagaccactctttcccacccaaaagagagaagatattgaggcctgttgccacatatgctgagactgataatgtgggtattagtccgccacatcatccgtctcaacatttgtgtctgttaggcaatctcacggacctggggctttgcttatatgcctttttttaccaggtcagttgttgcttgtgaagaagggtgtggttaagtctgcagtgcagaaggtggaagggatttcactctgtttttagagataggattggaactaagaattttaagtctatttgggtgaaggggcagggaagtgtaggaagacagttctaattaggaaggaggaattatactaggaagtagaggtaaaggaagtgagaaggcttagtaaatagaagaaatctgaacttatcaaataggctagtgtatacccctggagattcttgattaagtgaattaactagattttagaaaggtattgaggcagttatttgcaaggaacaattcaaagtctggagacaagaagtcaagcaatactttgagaagtggttgagctttttgggattggagagaattacactattgagatttgttaaaaatattgaagaaggtttcaccttgtgaaattgtgtttctcaattgaatctgagaaacaattgagcagaggctggagataattttgtctaaaagacagtggggtacagggagcaaaaaggccagggagaaagggaactgcaggaattagtgctgagaagcaggagttagtggttgaaggaggagatccaggcccagatacaggcaaataagtcaattccctctcccaagcttggcagtcagccctgcaggaaccaggataagagaaattgtttggtaaaaactaacaaaccaggcttgattctttgcagttagctctttatctttctctcccacaagtagtcagtagccttgttctagtgttttttgtgttacctctttttcctgaaaaaggaaggtactgttgagttattgttgttgatagtaatatagtagctgacagtggttcctctgtttgtggcaacttgtttcccacctaaattgcacacttagaaacagttattggtaagccttatattagatatatatagtgtctggtagtcttaccctctctataattacacactttttggcactgcccctttcctgccttgcagagccccaggggtgaatcttcctatttctccagctctgcaacagtcactgtactcagtgctgtgtcccacctgctgtgcccacagcctcaaacagccagtgacttcagagccaggaaacagctcaggagtctgccctgaggttgcttctcttcttatttccttgcagcctggccaaggggaggcttggcttgaactggcagctcaatttagccaaattcaggacaggccaccaggactctttctccacacttgctggtcccaccccaggttgagtgaggcagggccagtcaccagaggagcccagagcagagcaggaagcagagtctgagctgctcctccctcacccaaggggcttcctcctctcaattgggggaaaagtgtgagcttgtttcaaagcctcagttgttccttgtagttcttggaagaggtacaagaaaacaaagacctgacagaaggggttgaggtggtgacagtgagaagcaactggttgttcagcactctccttcttgtccctctgtgaagcctcttctaccacaaagggctcagggctgataaagccccctccctacctttctcaggccagacacaaggtcagtcttgagaaaacagaaaaaaaaggagaagagagtctgtagagacaaattgggagggttcaggaggagaatttgggatttgcctgtgcccagctagcgtagataagtagcatggcgggttaatcattaactacaaggaacccctagtgatggagttggccactccctctctgcgcgctcgctcgctcactgaggccgggcgaccaaaggtcgcccgacgcccgggctttgcccgggcggcctcagtgagcgagcgagcgcgcag

SEQ ID NO: 2261 - RNA, 138 nt, Artificial Sequence
  miR Cassette
ggcuacagaguuuccuuagcagagcugaggacuguaggcaacauauugcugucuaaacuaugcaauauguugacuacaguaauuagcuacugcuaggcaauccuucccucgauaaaugucuuggcaucguuugcuuug

SEQ ID NO: 2262 - DNA, 138 bp, Artificial Sequence
  miR Cassette
ggctacagagtttccttagcagagctgtatgtcttggcttgattcactgtgtctaaactatcagtgaatcaaaccaagaccgatagctactgctaggcaatccttccctcgataaatgtcttggcatcgtttgctttg

SEQ ID NO: 2263 - RNA, 138 nt, Artificial Sequence
  miR Cassette
ggcuacagaguuuccuuagcagagcuguaugucuuggcuugauucacugugucuaaacuaucagugaaucaaaccaagaccgauagcuacugcuaggcaauccuucccucgauaaaugucuuggcaucguuugcuuug

SEQ ID NO: 2264 - DNA, 138 bp, Artificial Sequence
  miR Cassette
ggctacagagtttgcttagcagagctgatagacatgaggatgctgagactgtctaaactatgtctcagcatcatcatgtcgcttagctactgctaggccatccttccctcgataaatgtcttggcatcgtttgctttg

SEQ ID NO: 2265 - RNA, 138 nt, Artificial Sequence
  miR Cassette
ggcuacagaguuugcuuagcagagcugauagacaugaggaugcugagacugucuaaacuaugucucagcaucaucaugucgcuuagcuacugcuaggccauccuucccucgauaaaugucuuggcaucguuugcuuug

SEQ ID NO: 2266 - DNA, 138 bp, Artificial Sequence
  miR Cassette
ggctacagagtttgcttagcagagctgaggatgctgagactgataatgttgtctaaactatacattatcagtatcagcataattagctactgctaggccatccttccctcgataaatgtcttggcatcgtttgctttg

SEQ ID NO: 2267 - RNA, 138 nt, Artificial Sequence
  miR Cassette
ggcuacagaguuugcuuagcagagcugaggaugcugagacugauaauguugucuaaacuauacauuaucaguaucagcauaauuagcuacugcuaggccauccuucccucgauaaaugucuuggcaucguuugcuuug

SEQ ID NO: 2268 - DNA, 138 bp, Artificial Sequence
  miR Cassette
ggctacagagtttgcttagcagagctgaggactgtaggcaacatattgctgtctaaactatgcaatatgttgactacagtaattagctactgctaggccatccttccctcgataaatgtcttggcatcgtttgctttg

SEQ ID NO: 2269 - DNA, 22 bp, Artificial Sequence
  Guide Sequence
tgtcaagtttagtaaaagggcg

SEQ ID NO: 2270 - DNA, 22 bp, Artificial Sequence
  Passenger Sequence
cgcccttttaacaaacttgact

SEQ ID NO: 2271 - RNA, 20 nt, Artificial Sequence
  Passenger Sequence
cgcccuuuuacuaaacuuga

SEQ ID NO: 2272 - DNA, 119 bp, Artificial Sequence
  miR Cassette
accggacatacttgttccactctgtcaagtttagtaaaagggcgtagtgaaatatatattaaacgcccttttaacaaacttgacttagtgtgacagggatacagcaactattttatcaa
